United States Patent Application Publication US 2023/0322900 A1 - sequence listing, part 2

SEQ ID NO: 1072 - DNA, 6162 bp, synthetic construct
  misc_feature 1..6162: note = Description of Artificial Sequence: Synthetic polynucleotide
  source 1..6162: mol_type = other DNA
gccaccagaagatactacctgggtgcagtggaactgtcatgggactatatgcaaagtgatctcggtgagctgcctgtgggcgcgccaggctccagcccctccgcgagcacgggaaccggaccaggttcgtcaccctcagcatcaacggggacgggaccgggggcgtcaccaggaacgtcctccaccggctcgccgggtgcatcacccggaacgtcatcgaccggatcgccagggagctcgacgccatcaggcgcaacaggatcacctggctcaagccctagcgcgtcaaccggcacgggtccgggtgcctcccctggcacgtccagcaccggatcacccggatcgagcccatccgcctcaaccggaaccggacccggtacaccagggtcgggaacagcctcctcgtcaccaggctcctcaaccccctcgggagccacgggttcgcccggttcgtcaacgccttccggagcaactggtagccccggagcatcgccaggaacttcgagcacggggtcgcccgcctcgagcgacgcaagatttcctcctagagtgccaaaatcttttccattcaacacctcagtcgtgtacaaaaagactctgtttgtagaattcacggatcaccttttcaacatcgctaagccaaggccaccctggatgggtctgctaggtcctaccatccaggctgaggtttatgatacagtggtcattacacttaagaacatggcttcccatcctgtcagtcttcatgctgttggtgtatcctactggaaagcttctgagggagctgaatatgatgatcagaccagtcaaagggagaaagaagatgataaagtcttccctggtggaagccatacatatgtctggcaggtcctgaaagagaatggtccaatggcctctgacccactgtgccttacctactcatatctttctcatgtggacctggtaaaagacttgaattcaggcctcattggagccctactagtatgtagagaagggagtctggccaaggaaaagacacagaccttgcacaaatttatactactttttgctgtatttgatgaagggaaaagttggcactcagaaacaaagaactccttgatgcaggatagggatgctgcatctgctcgggcctggcctaaaatgcacacagtcaatggttatgtaaacaggtctctgccaggtctgattggatgccacaggaaatcagtctattggcatgtgattggaatgggcaccactcctgaagtgcactcaatattcctcgaaggtcacacatttcttgtgaggaaccatcgccaggctagcttggaaatctcgccaataactttccttactgctcaaacactcttgatggaccttggacagtttctactgttttgtcatatctcttcccaccaacatgatggcatggaagcttatgtcaaagtagacagctgtccagaggaaccccaactacgaatgaaaaataatgaagaagcggaagactatgatgatgatcttactgattctgaaatggatgtggtcaggtttgatgatgacaactctccttcctttatccaaattcgctcagttgccaagaagcatcctaaaacttgggtacattacattgctgctgaagaggaggactgggactatgctcccttagtcctcgcccccgatgacagaagttataaaagtcaatatttgaacaatggccctcagcggattggtaggaagtacaaaaaagtccgatttatggcatacacagatgaaacctttaagactcgtgaagctattcagcatgaatcaggaatcttgggacctttactttatggggaagttggagacacactgttgattatatttaagaatcaagcaagcagaccatataacatctaccctcacggaatcactgatgtccgtcctttgtattcaaggagattaccaaaaggtgtaaaacatttgaaggattttccaattctgccaggagaaatattcaaatataaatggacagtgactgtagaagatgggccaactaaatcagatcctcggtgcctgacccgctattactctagtttcgttaatatggagagagatctagcttcaggactcattggccctctcctcatctgctacaaagaatctgtagatcaaagaggaaaccagataatgtcagacaagaggaatgtcatcctgttttctgtatttgatgagaaccgaagctggtacctcacagagaatatacaacgctttctccccaatccagctggagtgcagcttgaggatccagagttccaagcctccaacatcatgcacagcatcaatggctatgtttttgatagtttgcagttgtcagtttgtttgcatgaggtggcatactggtacattctaagcattggagcacagactgacttcctttctgtcttcttctctggatataccttcaaacacaaaatggtctatgaagacacactcaccctattcccattctcaggagaaactgtcttcatgtcgatggaaaacccaggtctatggattctggggtgccacaactcagactttcggaacagaggcatgaccgccttactgaaggtttctagttgtgacaagaacactggtgattattacgaggacagttatgaagatatttcagcatacttgctgagtaaaaacaatgccattgaaccaagaagcttctctcaaaacggcgcgccaagtcccgctggaagcccaactagcaccgaagaggggacctcagagtccgccacccccgagtccggccctggctctgagcctgccactagcggctccgagactcctggcacatccgaaagcgctacacccgagagtggacccggcacctctaccgagcccagtgagggctccgcccctggaacaagcaccgagcccagcgaaggcagcgccccagggacctccacagagcccagtgaaggcagtgctcctggcaccagcaccgaaccaagcgagggctctgcacccgggacctccaccgagccaagcgaaggctctgcccctggcacttccaccgagcccagcgaaggcagcgcccctgggagccccgctggctctcccaccagcactgaggagggcacatctaccgaaccaagtgaaggctctgcaccaggtgcctcgagcccaccagtcttgaaacgccatcaagctgaaataactcgtactactcttcagtcagatcaagaggaaatcgattatgatgataccatatcagttgaaatgaagaaggaagattttgacatttatgatgaggatgaaaatcagagcccccgcagctttcaaaagaaaacacgacactattttattgctgcagtggagaggctctgggattatgggatgagtagctccccacatgttctaagaaacagggctcagagtggcagtgtccctcagttcaagaaagttgttttccaggaatttactgatggctcctttactcagcccttataccgtggagaactaaatgaacatttgggactcctggggccatatataagagcagaagttgaagataatatcatggtaactttcagaaatcaggcctctcgtccctattccttctattctagccttatttcttatgaggaagatcagaggcaaggagcagaacctagaaaaaactttgtcaagcctaatgaaaccaaaacttacttttggaaagtgcaacatcatatggcacccactaaagatgagtttgactgcaaagcctgggcttatttctctgatgttgacctggaaaaagatgtgcactcaggcctgattggaccccttctggtctgccacactaacacactgaaccctgctcatgggagacaagtgacagtacaggaatttgctctgtttttcaccatctttgatgagaccaaaagctggtacttcactgaaaatatggaaagaaactgcagggctccctgcaatatccagatggaagatcccacttttaaagagaattatcgcttccatgcaatcaatggctacataatggatacactacctggcttagtaatggctcaggatcaaaggattcgatggtatctgctcagcatgggcagcaatgaaaacatccattctattcatttcagtggacatgtgttcactgtacgaaaaaaagaggagtataaaatggcactgtacaatctctatccaggtgtttttgagacagtggaaatgttaccatccaaagctggaatttggcgggtggaatgccttattggcgagcatctacatgctgggatgagcacactttttctggtgtacagcaataagtgtcagactcccctgggaatggcttctggacacattagagattttcagattacagcttcaggacaatatggacagtgggccccaaagctggccagacttcattattccggatcaatcaatgcctggagcaccaaggagcccttttcttggatcaaggtggatctgttggcaccaatgattattcacggcatcaagacccagggtgcccgtcagaagttctccagcctctacatctctcagtttatcatcatgtatagtcttgatgggaagaagtggcagacttatcgaggaaattccactggaaccttaatggtcttctttggcaatgtggattcatctgggataaaacacaatatttttaaccctccaattattgctcgatacatccgtttgcacccaactcattatagcattcgcagcactcttcgcatggagttgatgggctgtgatttaaatagttgcagcatgccattgggaatggagagtaaagcaatatcagatgcacagattactgcttcatcctactttaccaatatgtttgccacctggtctccttcaaaagctcgacttcacctccaagggaggagtaatgcctggagacctcaggtgaataatccaaaagagtggctgcaagtggacttccagaagacaatgaaagtcacaggagtaactactcagggagtaaaatctctgcttaccagcatgtatgtgaaggagttcctcatctccagcagtcaagatggccatcagtggactctcttttttcagaatggcaaagtaaaggtttttcagggaaatcaagactccttcacacctgtggtgaactctctagacccaccgttactgactcgctaccttcgaattcacccccagagttgggtgcaccagattgccctgaggatggaggttctgggctgcgaggcacaggacctctacggcgcgccaggtacctcagagtctgctacccccgagtcagggccaggatcagagccagccacctccgggtctgagacacccgggacttccgagagtgccacccctgagtccggacccgggtccgagcccgccacttccggctccgaaactcccggcacaagcgagagcgctaccccagagtcaggaccaggaacatctacagagccctctgaaggctccgctccagggtccccagccggcagtcccactagcaccgaggagggaacctctgaaagcgccacacccgaatcagggccagggtctgagcctgctaccagcggcagcgagacaccaggcacctctgagtccgccacaccagagtccggacccggatctcccgctgggagccccacctccactgaggagggatctcctgctggctctccaacatctactgaggaaggtacctcaaccgagccatccgagggatcagctcccggcacctcagagtcggcaaccccggagtctggacccggaacttccgaaagtgccacaccagagtccggtcccgggacttcagaatcagcaacacccgagtccggccctgggtctgaacccgccacaagtggtagtgagacaccaggatcagaacctgctacctcagggtcagagacacccggatctccggcaggctcaccaacctccactgaggagggcaccagcacagaaccaagcgagggctccgcacccggaacaagcactgaacccagtgagggttcagcacccggctctgagccggccacaagtggcagtgagacacccggcacttcagagagtgccacccccgagagtggcccaggcactagtaccgagccctctgaaggcagtgcgccagcctcgagcgaacaaaaactcatctcagaagaggatctgtcacctgcaaccggtcatcatcaccatcaccattga

SEQ ID NO: 1073 - protein, 2053 aa, synthetic construct
  REGION 1..2053: note = Description of Artificial Sequence: Synthetic polypeptide
ATRRYYLGAVELSWDYMQSDLGELPVDARFPPRVPKSFPFGAPGSSPSASTGTGPGSSPSASTGTGPGASPGTSSTGSPGASPGTSSTGSPGSSTPSGATGSPGSSPSASTGTGPGASPGTSSTGSPGSSPSASTGTGPGTPGSGTASSSPGSSTPSGATGSPGSSTPSGATGSPGASPGTSSTGSPASSNTSVVYKKTLFVEFTDHLFNIAKPRPPWMGLLGPTIQAEVYDTVVITLKNMASHPVSLHAVGVSYWKASEGAEYDDQTSQREKEDDKVFPGGSHTYVWQVLKENGPMASDPLCLTYSYLSHVDLVKDLNSGLIGALLVCREGSLAKEKTQTLHKFILLFAVFDEGKSWHSETKNSLMQDRDAASARAWPKMHTVNGYVNRSLPGLIGCHRKSVYWHVIGMGTTPEVHSIFLEGHTFLVRNHRQASLEISPITFLTAQTLLMDLGQFLLFCHISSHQHDGMEAYVKVDSCPEEPQLRMKNNEEAEDYDDDLTDSEMDVVRFDDDNSPSFIQIRSVAKKHPKTWVHYIAAEEEDWDYAPLVLAPDDRSYKSQYLNNGPQRIGRKYKKVRFMAYTDETFKTREAIQHESGILGPLLYGEVGDTLLIIFKNQASRPYNIYPHGITDVRPLYSRRLPKGVKHLKDFPILPGEIFKYKWTVTVEDGPTKSDPRCLTRYYSSFVNMERDLASGLIGPLLICYKESVDQRGNQIMSDKRNVILFSVFDENRSWYLTENIQRFLPNPAGVQLEDPEFQASNIMHSINGYVFDSLQLSVCLHEVAYWYILSIGAQTDFLSVFFSGYTFKHKMVYEDTLTLFPFSGETVFMSMENPGLWILGCHNSDFRNRGMTALLKVSSCDKNTGDYYEDSYEDISAYLLSKNNAIEPRSFSQNGAPSPAGSPTSTEEGTSESATPESGPGSEPATSGSETPGTSESATPESGPGTSTEPSEGSAPGTSTEPSEGSAPGTSTEPSEGSAPGTSTEPSEGSAPGTSTEPSEGSAPGTSTEPSEGSAPGSPAGSPTSTEEGTSTEPSEGSAPGASSPPVLKRHQAEITRTTLQSDQEEIDYDDTISVEMKKEDFDIYDEDENQSPRSFQKKTRHYFIAAVERLWDYGMSSSPHVLRNRAQSGSVPQFKKVVFQEFTDGSFTQPLYRGELNEHLGLLGPYIRAEVEDNIMVTFRNQASRPYSFYSSLISYEEDQRQGAEPRKNFVKPNETKTYFWKVQHHMAPTKDEFDCKAWAYFSDVDLEKDVHSGLIGPLLVCHTNTLNPAHGRQVTVQEFALFFTIFDETKSWYFTENMERNCRAPCNIQMEDPTFKENYRFHAINGYIMDTLPGLVMAQDQRIRWYLLSMGSNENIHSIHFSGHVFTVRKKEEYKMALYNLYPGVFETVEMLPSKAGIWRVECLIGEHLHAGMSTLFLVYSNKCQTPLGMASGHIRDFQITASGQYGQWAPKLARLHYSGSINAWSTKEPFSWIKVDLLAPMIIHGIKTQGARQKFSSLYISQFIIMYSLDGKKWQTYRGNSTGTLMVFFGNVDSSGIKHNIFNPPIIARYIRLHPTHYSIRSTLRMELMGCDLNSCSMPLGMESKAISDAQITASSYFTNMFATWSPSKARLHLQGRSNAWRPQVNNPKEWLQVDFQKTMKVTGVTTQGVKSLLTSMYVKEFLISSSQDGHQWTLFFQNGKVKVFQGNQDSFTPVVNSLDPPLLTRYLRIHPQSWVHQIALRMEVLGCEAQDLYGAPGTSESATPESGPGSEPATSGSETPGTSESATPESGPGSEPATSGSETPGTSESATPESGPGTSTEPSEGSAPGSPAGSPTSTEEGTSESATPESGPGSEPATSGSETPGTSESATPESGPGSPAGSPTSTEEGSPAGSPTSTEEGTSTEPSEGSAPGTSESATPESGPGTSESATPESGPGTSESATPESGPGSEPATSGSETPGSEPATSGSETPGSPAGSPTSTEEGTSTEPSEGSAPGTSTEPSEGSAPGSEPATSGSETPGTSESATPESGPGTSTEPSEGSAPASSEQKLISEEDLSPATGHHHHHH

SEQ ID NO: 1074 - DNA, 6162 bp, synthetic construct
  misc_feature 1..6162: note = Description of Artificial Sequence: Synthetic polynucleotide
  source 1..6162: mol_type = other DNA
gccaccagaagatactacctgggtgcagtggaactgtcatgggactatatgcaaagtgatctcggtgagctgcctgtggacgcaagatttcctcctagagtgccaaaatcttttccattcggcgcgccaggctccagcccctccgcgagcacgggaaccggaccaggttcgtcaccctcagcatcaacggggacgggaccgggggcgtcaccaggaacgtcctccaccggctcgccgggtgcatcacccggaacgtcatcgaccggatcgccagggagctcgacgccatcaggcgcaacaggatcacctggctcaagccctagcgcgtcaaccggcacgggtccgggtgcctcccctggcacgtccagcaccggatcacccggatcgagcccatccgcctcaaccggaaccggacccggtacaccagggtcgggaacagcctcctcgtcaccaggctcctcaaccccctcgggagccacgggttcgcccggttcgtcaacgccttccggagcaactggtagccccggagcatcgccaggaacttcgagcacggggtcgcccgcctcgagcaacacctcagtcgtgtacaaaaagactctgtttgtagaattcacggatcaccttttcaacatcgctaagccaaggccaccctggatgggtctgctaggtcctaccatccaggctgaggtttatgatacagtggtcattacacttaagaacatggcttcccatcctgtcagtcttcatgctgttggtgtatcctactggaaagcttctgagggagctgaatatgatgatcagaccagtcaaagggagaaagaagatgataaagtcttccctggtggaagccatacatatgtctggcaggtcctgaaagagaatggtccaatggcctctgacccactgtgccttacctactcatatctttctcatgtggacctggtaaaagacttgaattcaggcctcattggagccctactagtatgtagagaagggagtctggccaaggaaaagacacagaccttgcacaaatttatactactttttgctgtatttgatgaagggaaaagttggcactcagaaacaaagaactccttgatgcaggatagggatgctgcatctgctcgggcctggcctaaaatgcacacagtcaatggttatgtaaacaggtctctgccaggtctgattggatgccacaggaaatcagtctattggcatgtgattggaatgggcaccactcctgaagtgcactcaatattcctcgaaggtcacacatttcttgtgaggaaccatcgccaggctagcttggaaatctcgccaataactttccttactgctcaaacactcttgatggaccttggacagtttctactgttttgtcatatctcttcccaccaacatgatggcatggaagcttatgtcaaagtagacagctgtccagaggaaccccaactacgaatgaaaaataatgaagaagcggaagactatgatgatgatcttactgattctgaaatggatgtggtcaggtttgatgatgacaactctccttcctttatccaaattcgctcagttgccaagaagcatcctaaaacttgggtacattacattgctgctgaagaggaggactgggactatgctcccttagtcctcgcccccgatgacagaagttataaaagtcaatatttgaacaatggccctcagcggattggtaggaagtacaaaaaagtccgatttatggcatacacagatgaaacctttaagactcgtgaagctattcagcatgaatcaggaatcttgggacctttactttatggggaagttggagacacactgttgattatatttaagaatcaagcaagcagaccatataacatctaccctcacggaatcactgatgtccgtcctttgtattcaaggagattaccaaaaggtgtaaaacatttgaaggattttccaattctgccaggagaaatattcaaatataaatggacagtgactgtagaagatgggccaactaaatcagatcctcggtgcctgacccgctattactctagtttcgttaatatggagagagatctagcttcaggactcattggccctctcctcatctgctacaaagaatctgtagatcaaagaggaaaccagataatgtcagacaagaggaatgtcatcctgttttctgtatttgatgagaaccgaagctggtacctcacagagaatatacaacgctttctccccaatccagctggagtgcagcttgaggatccagagttccaagcctccaacatcatgcacagcatcaatggctatgtttttgatagtttgcagttgtcagtttgtttgcatgaggtggcatactggtacattctaagcattggagcacagactgacttcctttctgtcttcttctctggatataccttcaaacacaaaatggtctatgaagacacactcaccctattcccattctcaggagaaactgtcttcatgtcgatggaaaacccaggtctatggattctggggtgccacaactcagactttcggaacagaggcatgaccgccttactgaaggtttctagttgtgacaagaacactggtgattattacgaggacagttatgaagatatttcagcatacttgctgagtaaaaacaatgccattgaaccaagaagcttctctcaaaacggcgcgccaagtcccgctggaagcccaactagcaccgaagaggggacctcagagtccgccacccccgagtccggccctggctctgagcctgccactagcggctccgagactcctggcacatccgaaagcgctacacccgagagtggacccggcacctctaccgagcccagtgagggctccgcccctggaacaagcaccgagcccagcgaaggcagcgccccagggacctccacagagcccagtgaaggcagtgctcctggcaccagcaccgaaccaagcgagggctctgcacccgggacctccaccgagccaagcgaaggctctgcccctggcacttccaccgagcccagcgaaggcagcgcccctgggagccccgctggctctcccaccagcactgaggagggcacatctaccgaaccaagtgaaggctctgcaccaggtgcctcgagcccaccagtcttgaaacgccatcaagctgaaataactcgtactactcttcagtcagatcaagaggaaatcgattatgatgataccatatcagttgaaatgaagaaggaagattttgacatttatgatgaggatgaaaatcagagcccccgcagctttcaaaagaaaacacgacactattttattgctgcagtggagaggctctgggattatgggatgagtagctccccacatgttctaagaaacagggctcagagtggcagtgtccctcagttcaagaaagttgttttccaggaatttactgatggctcctttactcagcccttataccgtggagaactaaatgaacatttgggactcctggggccatatataagagcagaagttgaagataatatcatggtaactttcagaaatcaggcctctcgtccctattccttctattctagccttatttcttatgaggaagatcagaggcaaggagcagaacctagaaaaaactttgtcaagcctaatgaaaccaaaacttacttttggaaagtgcaacatcatatggcacccactaaagatgagtttgactgcaaagcctgggcttatttctctgatgttgacctggaaaaagatgtgcactcaggcctgattggaccccttctggtctgccacactaacacactgaaccctgctcatgggagacaagtgacagtacaggaatttgctctgtttttcaccatctttgatgagaccaaaagctggtacttcactgaaaatatggaaagaaactgcagggctccctgcaatatccagatggaagatcccacttttaaagagaattatcgcttccatgcaatcaatggctacataatggatacactacctggcttagtaatggctcaggatcaaaggattcgatggtatctgctcagcatgggcagcaatgaaaacatccattctattcatttcagtggacatgtgttcactgtacgaaaaaaagaggagtataaaatggcactgtacaatctctatccaggtgtttttgagacagtggaaatgttaccatccaaagctggaatttggcgggtggaatgccttattggcgagcatctacatgctgggatgagcacactttttctggtgtacagcaataagtgtcagactcccctgggaatggcttctggacacattagagattttcagattacagcttcaggacaatatggacagtgggccccaaagctggccagacttcattattccggatcaatcaatgcctggagcaccaaggagcccttttcttggatcaaggtggatctgttggcaccaatgattattcacggcatcaagacccagggtgcccgtcagaagttctccagcctctacatctctcagtttatcatcatgtatagtcttgatgggaagaagtggcagacttatcgaggaaattccactggaaccttaatggtcttctttggcaatgtggattcatctgggataaaacacaatatttttaaccctccaattattgctcgatacatccgtttgcacccaactcattatagcattcgcagcactcttcgcatggagttgatgggctgtgatttaaatagttgcagcatgccattgggaatggagagtaaagcaatatcagatgcacagattactgcttcatcctactttaccaatatgtttgccacctggtctccttcaaaagctcgacttcacctccaagggaggagtaatgcctggagacctcaggtgaataatccaaaagagtggctgcaagtggacttccagaagacaatgaaagtcacaggagtaactactcagggagtaaaatctctgcttaccagcatgtatgtgaaggagttcctcatctccagcagtcaagatggccatcagtggactctcttttttcagaatggcaaagtaaaggtttttcagggaaatcaagactccttcacacctgtggtgaactctctagacccaccgttactgactcgctaccttcgaattcacccccagagttgggtgcaccagattgccctgaggatggaggttctgggctgcgaggcacaggacctctacggcgcgccaggtacctcagagtctgctacccccgagtcagggccaggatcagagccagccacctccgggtctgagacacccgggacttccgagagtgccacccctgagtccggacccgggtccgagcccgccacttccggctccgaaactcccggcacaagcgagagcgctaccccagagtcaggaccaggaacatctacagagccctctgaaggctccgctccagggtccccagccggcagtcccactagcaccgaggagggaacctctgaaagcgccacacccgaatcagggccagggtctgagcctgctaccagcggcagcgagacaccaggcacctctgagtccgccacaccagagtccggacccggatctcccgctgggagccccacctccactgaggagggatctcctgctggctctccaacatctactgaggaaggtacctcaaccgagccatccgagggatcagctcccggcacctcagagtcggcaaccccggagtctggacccggaacttccgaaagtgccacaccagagtccggtcccgggacttcagaatcagcaacacccgagtccggccctgggtctgaacccgccacaagtggtagtgagacaccaggatcagaacctgctacctcagggtcagagacacccggatctccggcaggctcaccaacctccactgaggagggcaccagcacagaaccaagcgagggctccgcacccggaacaagcactgaacccagtgagggttcagcacccggctctgagccggccacaagtggcagtgagacacccggcacttcagagagtgccacccccgagagtggcccaggcactagtaccgagccctctgaaggcagtgcgccagcctcgagcgaacaaaaactcatctcagaagaggatctgtcacctgcaaccggtcatcatcaccatcaccattga

SEQ ID NO: 1075 - protein, 2053 aa, synthetic construct
  REGION 1..2053: note = Description of Artificial Sequence: Synthetic polypeptide
ATRRYYLGAVELSWDYMQSDLGELPVDARFPPRVPKSFPFGAPTSESATPESGPGSEPATSGSETPGTSESATPESGPGSEPATSGSETPGTSESATPESGPGTSTEPSEGSAPGSPAGSPTSTEEGTSESATPESGPGSEPATSGSETPGTSESATPESGPGSPAGSPTSTEEGSPAGSPTSTEEGASSNTSVVYKKTLFVEFTDHLFNIAKPRPPWMGLLGPTIQAEVYDTVVITLKNMASHPVSLHAVGVSYWKASEGAEYDDQTSQREKEDDKVFPGGSHTYVWQVLKENGPMASDPLCLTYSYLSHVDLVKDLNSGLIGALLVCREGSLAKEKTQTLHKFILLFAVFDEGKSWHSETKNSLMQDRDAASARAWPKMHTVNGYVNRSLPGLIGCHRKSVYWHVIGMGTTPEVHSIFLEGHTFLVRNHRQASLEISPITFLTAQTLLMDLGQFLLFCHISSHQHDGMEAYVKVDSCPEEPQLRMKNNEEAEDYDDDLTDSEMDVVRFDDDNSPSFIQIRSVAKKHPKTWVHYIAAEEEDWDYAPLVLAPDDRSYKSQYLNNGPQRIGRKYKKVRFMAYTDETFKTREAIQHESGILGPLLYGEVGDTLLIIFKNQASRPYNIYPHGITDVRPLYSRRLPKGVKHLKDFPILPGEIFKYKWTVTVEDGPTKSDPRCLTRYYSSFVNMERDLASGLIGPLLICYKESVDQRGNQIMSDKRNVILFSVFDENRSWYLTENIQRFLPNPAGVQLEDPEFQASNIMHSINGYVFDSLQLSVCLHEVAYWYILSIGAQTDFLSVFFSGYTFKHKMVYEDTLTLFPFSGETVFMSMENPGLWILGCHNSDFRNRGMTALLKVSSCDKNTGDYYEDSYEDISAYLLSKNNAIEPRSFSQNGAPSPAGSPTSTEEGTSESATPESGPGSEPATSGSETPGTSESATPESGPGTSTEPSEGSAPGTSTEPSEGSAPGTSTEPSEGSAPGTSTEPSEGSAPGTSTEPSEGSAPGTSTEPSEGSAPGSPAGSPTSTEEGTSTEPSEGSAPGASSPPVLKRHQAEITRTTLQSDQEEIDYDDTISVEMKKEDFDIYDEDENQSPRSFQKKTRHYFIAAVERLWDYGMSSSPHVLRNRAQSGSVPQFKKVVFQEFTDGSFTQPLYRGELNEHLGLLGPYIRAEVEDNIMVTFRNQASRPYSFYSSLISYEEDQRQGAEPRKNFVKPNETKTYFWKVQHHMAPTKDEFDCKAWAYFSDVDLEKDVHSGLIGPLLVCHTNTLNPAHGRQVTVQEFALFFTIFDETKSWYFTENMERNCRAPCNIQMEDPTFKENYRFHAINGYIMDTLPGLVMAQDQRIRWYLLSMGSNENIHSIHFSGHVFTVRKKEEYKMALYNLYPGVFETVEMLPSKAGIWRVECLIGEHLHAGMSTLFLVYSNKCQTPLGMASGHIRDFQITASGQYGQWAPKLARLHYSGSINAWSTKEPFSWIKVDLLAPMIIHGIKTQGARQKFSSLYISQFIIMYSLDGKKWQTYRGNSTGTLMVFFGNVDSSGIKHNIFNPPIIARYIRLHPTHYSIRSTLRMELMGCDLNSCSMPLGMESKAISDAQITASSYFTNMFATWSPSKARLHLQGRSNAWRPQVNNPKEWLQVDFQKTMKVTGVTTQGVKSLLTSMYVKEFLISSSQDGHQWTLFFQNGKVKVFQGNQDSFTPVVNSLDPPLLTRYLRIHPQSWVHQIALRMEVLGCEAQDLYGAPGTSESATPESGPGSEPATSGSETPGTSESATPESGPGSEPATSGSETPGTSESATPESGPGTSTEPSEGSAPGSPAGSPTSTEEGTSESATPESGPGSEPATSGSETPGTSESATPESGPGSPAGSPTSTEEGSPAGSPTSTEEGTSTEPSEGSAPGTSESATPESGPGTSESATPESGPGTSESATPESGPGSEPATSGSETPGSEPATSGSETPGSPAGSPTSTEEGTSTEPSEGSAPGTSTEPSEGSAPGSEPATSGSETPGTSESATPESGPGTSTEPSEGSAPASSEQKLISEEDLSPATGHHHHHH

SEQ ID NO: 1076 - DNA, 6162 bp, synthetic construct
  misc_feature 1..6162: note = Description of Artificial Sequence: Synthetic polynucleotide
  source 1..6162: mol_type = other DNA
gccaccagaagatactacctgggtgcagtggaactgtcatgggactatatgcaaagtgatctcggtgagctgcctgtggacgcaagatttcctcctagagtgccaaaatcttttccattcggcgcgccaacatcagagagcgccacccctgaaagtggtcccgggagcgagccagccacatctgggtcggaaacgccaggcacaagtgagtctgcaactcccgagtccggacctggctccgagcctgccactagcggctccgagactccgggaacttccgagagcgctacaccagaaagcggacccggaaccagtaccgaacctagcgagggctctgctccgggcagcccagccggctctcctacatccacggaggagggcacttccgaatccgccaccccggagtcagggccaggatctgaacccgctacctcaggcagtgagacgccaggaacgagcgagtccgctacaccggagagtgggccagggagccctgctggatctcctacgtccactgaggaagggtcaccagcgggctcgcccaccagcactgaagaaggtgcctcgagcaacacctcagtcgtgtacaaaaagactctgtttgtagaattcacggatcaccttttcaacatcgctaagccaaggccaccctggatgggtctgctaggtcctaccatccaggctgaggtttatgatacagtggtcattacacttaagaacatggcttcccatcctgtcagtcttcatgctgttggtgtatcctactggaaagcttctgagggagctgaatatgatgatcagaccagtcaaagggagaaagaagatgataaagtcttccctggtggaagccatacatatgtctggcaggtcctgaaagagaatggtccaatggcctctgacccactgtgccttacctactcatatctttctcatgtggacctggtaaaagacttgaattcaggcctcattggagccctactagtatgtagagaagggagtctggccaaggaaaagacacagaccttgcacaaatttatactactttttgctgtatttgatgaagggaaaagttggcactcagaaacaaagaactccttgatgcaggatagggatgctgcatctgctcgggcctggcctaaaatgcacacagtcaatggttatgtaaacaggtctctgccaggtctgattggatgccacaggaaatcagtctattggcatgtgattggaatgggcaccactcctgaagtgcactcaatattcctcgaaggtcacacatttcttgtgaggaaccatcgccaggctagcttggaaatctcgccaataactttccttactgctcaaacactcttgatggaccttggacagtttctactgttttgtcatatctcttcccaccaacatgatggcatggaagcttatgtcaaagtagacagctgtccagaggaaccccaactacgaatgaaaaataatgaagaagcggaagactatgatgatgatcttactgattctgaaatggatgtggtcaggtttgatgatgacaactctccttcctttatccaaattcgctcagttgccaagaagcatcctaaaacttgggtacattacattgctgctgaagaggaggactgggactatgctcccttagtcctcgcccccgatgacagaagttataaaagtcaatatttgaacaatggccctcagcggattggtaggaagtacaaaaaagtccgatttatggcatacacagatgaaacctttaagactcgtgaagctattcagcatgaatcaggaatcttgggacctttactttatggggaagttggagacacactgttgattatatttaagaatcaagcaagcagaccatataacatctaccctcacggaatcactgatgtccgtcctttgtattcaaggagattaccaaaaggtgtaaaacatttgaaggattttccaattctgccaggagaaatattcaaatataaatggacagtgactgtagaagatgggccaactaaatcagatcctcggtgcctgacccgctattactctagtttcgttaatatggagagagatctagcttcaggactcattggccctctcctcatctgctacaaagaatctgtagatcaaagaggaaaccagataatgtcagacaagaggaatgtcatcctgttttctgtatttgatgagaaccgaagctggtacctcacagagaatatacaacgctttctccccaatccagctggagtgcagcttgaggatccagagttccaagcctccaacatcatgcacagcatcaatggctatgtttttgatagtttgcagttgtcagtttgtttgcatgaggtggcatactggtacattctaagcattggagcacagactgacttcctttctgtcttcttctctggatataccttcaaacacaaaatggtctatgaagacacactcaccctattcccattctcaggagaaactgtcttcatgtcgatggaaaacccaggtctatggattctggggtgccacaactcagactttcggaacagaggcatgaccgccttactgaaggtttctagttgtgacaagaacactggtgattattacgaggacagttatgaagatatttcagcatacttgctgagtaaaaacaatgccattgaaccaagaagcttctctcaaaacggcgcgccaagtcccgctggaagcccaactagcaccgaagaggggacctcagagtccgccacccccgagtccggccctggctctgagcctgccactagcggctccgagactcctggcacatccgaaagcgctacacccgagagtggacccggcacctctaccgagcccagtgagggctccgcccctggaacaagcaccgagcccagcgaaggcagcgccccagggacctccacagagcccagtgaaggcagtgctcctggcaccagcaccgaaccaagcgagggctctgcacccgggacctccaccgagccaagcgaaggctctgcccctggcacttccaccgagcccagcgaaggcagcgcccctgggagccccgctggctctcccaccagcactgaggagggcacatctaccgaaccaagtgaaggctctgcaccaggtgcctcgagcccaccagtcttgaaacgccatcaagctgaaataactcgtactactcttcagtcagatcaagaggaaatcgattatgatgataccatatcagttgaaatgaagaaggaagattttgacatttatgatgaggatgaaaatcagagcccccgcagctttcaaaagaaaacacgacactattttattgctgcagtggagaggctctgggattatgggatgagtagctccccacatgttctaagaaacagggctcagagtggcagtgtccctcagttcaagaaagttgttttccaggaatttactgatggctcctttactcagcccttataccgtggagaactaaatgaacatttgggactcctggggccatatataagagcagaagttgaagataatatcatggtaactttcagaaatcaggcctctcgtccctattccttctattctagccttatttcttatgaggaagatcagaggcaaggagcagaacctagaaaaaactttgtcaagcctaatgaaaccaaaacttacttttggaaagtgcaacatcatatggcacccactaaagatgagtttgactgcaaagcctgggcttatttctctgatgttgacctggaaaaagatgtgcactcaggcctgattggaccccttctggtctgccacactaacacactgaaccctgctcatgggagacaagtgacagtacaggaatttgctctgtttttcaccatctttgatgagaccaaaagctggtacttcactgaaaatatggaaagaaactgcagggctccctgcaatatccagatggaagatcccacttttaaagagaattatcgcttccatgcaatcaatggctacataatggatacactacctggcttagtaatggctcaggatcaaaggattcgatggtatctgctcagcatgggcagcaatgaaaacatccattctattcatttcagtggacatgtgttcactgtacgaaaaaaagaggagtataaaatggcactgtacaatctctatccaggtgtttttgagacagtggaaatgttaccatccaaagctggaatttggcgggtggaatgccttattggcgagcatctacatgctgggatgagcacactttttctggtgtacagcaataagtgtcagactcccctgggaatggcttctggacacattagagattttcagattacagcttcaggacaatatggacagtgggccccaaagctggccagacttcattattccggatcaatcaatgcctggagcaccaaggagcccttttcttggatcaaggtggatctgttggcaccaatgattattcacggcatcaagacccagggtgcccgtcagaagttctccagcctctacatctctcagtttatcatcatgtatagtcttgatgggaagaagtggcagacttatcgaggaaattccactggaaccttaatggtcttctttggcaatgtggattcatctgggataaaacacaatatttttaaccctccaattattgctcgatacatccgtttgcacccaactcattatagcattcgcagcactcttcgcatggagttgatgggctgtgatttaaatagttgcagcatgccattgggaatggagagtaaagcaatatcagatgcacagattactgcttcatcctactttaccaatatgtttgccacctggtctccttcaaaagctcgacttcacctccaagggaggagtaatgcctggagacctcaggtgaataatccaaaagagtggctgcaagtggacttccagaagacaatgaaagtcacaggagtaactactcagggagtaaaatctctgcttaccagcatgtatgtgaaggagttcctcatctccagcagtcaagatggccatcagtggactctcttttttcagaatggcaaagtaaaggtttttcagggaaatcaagactccttcacacctgtggtgaactctctagacccaccgttactgactcgctaccttcgaattcacccccagagttgggtgcaccagattgccctgaggatggaggttctgggctgcgaggcacaggacctctacggcgcgccaggtacctcagagtctgctacccccgagtcagggccaggatcagagccagccacctccgggtctgagacacccgggacttccgagagtgccacccctgagtccggacccgggtccgagcccgccacttccggctccgaaactcccggcacaagcgagagcgctaccccagagtcaggaccaggaacatctacagagccctctgaaggctccgctccagggtccccagccggcagtcccactagcaccgaggagggaacctctgaaagcgccacacccgaatcagggccagggtctgagcctgctaccagcggcagcgagacaccaggcacctctgagtccgccacaccagagtccggacccggatctcccgctgggagccccacctccactgaggagggatctcctgctggctctccaacatctactgaggaaggtacctcaaccgagccatccgagggatcagctcccggcacctcagagtcggcaaccccggagtctggacccggaacttccgaaagtgccacaccagagtccggtcccgggacttcagaatcagcaacacccgagtccggccctgggtctgaacccgccacaagtggtagtgagacaccaggatcagaacctgctacctcagggtcagagacacccggatctccggcaggctcaccaacctccactgaggagggcaccagcacagaaccaagcgagggctccgcacccggaacaagcactgaacccagtgagggttcagcacccggctctgagccggccacaagtggcagtgagacacccggcacttcagagagtgccacccccgagagtggcccaggcactagtaccgagccctctgaaggcagtgcgccagcctcgagcgaacaaaaactcatctcagaagaggatctgtcacctgcaaccggtcatcatcaccatcaccattga

SEQ ID NO: 1077 - protein, 2053 aa, synthetic construct
  REGION 1..2053: note = Description of Artificial Sequence: Synthetic polypeptide
ATRRYYLGAVELSWDYMQGAPTSESATPESGPGSEPATSGSETPGTSESATPESGPGSEPATSGSETPGTSESATPESGPGTSTEPSEGSAPGSPAGSPTSTEEGTSESATPESGPGSEPATSGSETPGTSESATPESGPGSPAGSPTSTEEGSPAGSPTSTEEGASSSDLGELPVDARFPPRVPKSFPFNTSVVYKKTLFVEFTDHLFNIAKPRPPWMGLLGPTIQAEVYDTVVITLKNMASHPVSLHAVGVSYWKASEGAEYDDQTSQREKEDDKVFPGGSHTYVWQVLKENGPMASDPLCLTYSYLSHVDLVKDLNSGLIGALLVCREGSLAKEKTQTLHKFILLFAVFDEGKSWHSETKNSLMQDRDAASARAWPKMHTVNGYVNRSLPGLIGCHRKSVYWHVIGMGTTPEVHSIFLEGHTFLVRNHRQASLEISPITFLTAQTLLMDLGQFLLFCHISSHQHDGMEAYVKVDSCPEEPQLRMKNNEEAEDYDDDLTDSEMDVVRFDDDNSPSFIQIRSVAKKHPKTWVHYIAAEEEDWDYAPLVLAPDDRSYKSQYLNNGPQRIGRKYKKVRFMAYTDETFKTREAIQHESGILGPLLYGEVGDTLLIIFKNQASRPYNIYPHGITDVRPLYSRRLPKGVKHLKDFPILPGEIFKYKWTVTVEDGPTKSDPRCLTRYYSSFVNMERDLASGLIGPLLICYKESVDQRGNQIMSDKRNVILFSVFDENRSWYLTENIQRFLPNPAGVQLEDPEFQASNIMHSINGYVFDSLQLSVCLHEVAYWYILSIGAQTDFLSVFFSGYTFKHKMVYEDTLTLFPFSGETVFMSMENPGLWILGCHNSDFRNRGMTALLKVSSCDKNTGDYYEDSYEDISAYLLSKNNAIEPRSFSQNGAPSPAGSPTSTEEGTSESATPESGPGSEPATSGSETPGTSESATPESGPGTSTEPSEGSAPGTSTEPSEGSAPGTSTEPSEGSAPGTSTEPSEGSAPGTSTEPSEGSAPGTSTEPSEGSAPGSPAGSPTSTEEGTSTEPSEGSAPGASSPPVLKRHQAEITRTTLQSDQEEIDYDDTISVEMKKEDFDIYDEDENQSPRSFQKKTRHYFIAAVERLWDYGMSSSPHVLRNRAQSGSVPQFKKVVFQEFTDGSFTQPLYRGELNEHLGLLGPYIRAEVEDNIMVTFRNQASRPYSFYSSLISYEEDQRQGAEPRKNFVKPNETKTYFWKVQHHMAPTKDEFDCKAWAYFSDVDLEKDVHSGLIGPLLVCHTNTLNPAHGRQVTVQEFALFFTIFDETKSWYFTENMERNCRAPCNIQMEDPTFKENYRFHAINGYIMDTLPGLVMAQDQRIRWYLLSMGSNENIHSIHFSGHVFTVRKKEEYKMALYNLYPGVFETVEMLPSKAGIWRVECLIGEHLHAGMSTLFLVYSNKCQTPLGMASGHIRDFQITASGQYGQWAPKLARLHYSGSINAWSTKEPFSWIKVDLLAPMIIHGIKTQGARQKFSSLYISQFIIMYSLDGKKWQTYRGNSTGTLMVFFGNVDSSGIKHNIFNPPIIARYIRLHPTHYSIRSTLRMELMGCDLNSCSMPLGMESKAISDAQITASSYFTNMFATWSPSKARLHLQGRSNAWRPQVNNPKEWLQVDFQKTMKVTGVTTQGVKSLLTSMYVKEFLISSSQDGHQWTLFFQNGKVKVFQGNQDSFTPVVNSLDPPLLTRYLRIHPQSWVHQIALRMEVLGCEAQDLYGAPGTSESATPESGPGSEPATSGSETPGTSESATPESGPGSEPATSGSETPGTSESATPESGPGTSTEPSEGSAPGSPAGSPTSTEEGTSESATPESGPGSEPATSGSETPGTSESATPESGPGSPAGSPTSTEEGSPAGSPTSTEEGTSTEPSEGSAPGTSESATPESGPGTSESATPESGPGTSESATPESGPGSEPATSGSETPGSEPATSGSETPGSPAGSPTSTEEGTSTEPSEGSAPGTSTEPSEGSAPGSEPATSGSETPGTSESATPESGPGTSTEPSEGSAPASSEQKLISEEDLSPATGHHHHHH

SEQ ID NO: 1078 - DNA, 6162 bp, synthetic construct
  misc_feature 1..6162: note = Description of Artificial Sequence: Synthetic polynucleotide
  source 1..6162: mol_type = other DNA
gccaccagaagatactacctgggtgcagtggaactgtcatgggactatatgcaaggcgcgccaacatcagagagcgccacccctgaaagtggtcccgggagcgagccagccacatctgggtcggaaacgccaggcacaagtgagtctgcaactcccgagtccggacctggctccgagcctgccactagcggctccgagactccgggaacttccgagagcgctacaccagaaagcggacccggaaccagtaccgaacctagcgagggctctgctccgggcagcccagccggctctcctacatccacggaggagggcacttccgaatccgccaccccggagtcagggccaggatctgaacccgctacctcaggcagtgagacgccaggaacgagcgagtccgctacaccggagagtgggccagggagccctgctggatctcctacgtccactgaggaagggtcaccagcgggctcgcccaccagcactgaagaaggtgcctcgagcagtgatctcggtgagctgcctgtggacgcaagatttcctcctagagtgccaaaatcttttccattcaacacctcagtcgtgtacaaaaagactctgtttgtagaattcacggatcaccttttcaacatcgctaagccaaggccaccctggatgggtctgctaggtcctaccatccaggctgaggtttatgatacagtggtcattacacttaagaacatggcttcccatcctgtcagtcttcatgctgttggtgtatcctactggaaagcttctgagggagctgaatatgatgatcagaccagtcaaagggagaaagaagatgataaagtcttccctggtggaagccatacatatgtctggcaggtcctgaaagagaatggtccaatggcctctgacccactgtgccttacctactcatatctttctcatgtggacctggtaaaagacttgaattcaggcctcattggagccctactagtatgtagagaagggagtctggccaaggaaaagacacagaccttgcacaaatttatactactttttgctgtatttgatgaagggaaaagttggcactcagaaacaaagaactccttgatgcaggatagggatgctgcatctgctcgggcctggcctaaaatgcacacagtcaatggttatgtaaacaggtctctgccaggtctgattggatgccacaggaaatcagtctattggcatgtgattggaatgggcaccactcctgaagtgcactcaatattcctcgaaggtcacacatttcttgtgaggaaccatcgccaggctagcttggaaatctcgccaataactttccttactgctcaaacactcttgatggaccttggacagtttctactgttttgtcatatctcttcccaccaacatgatggcatggaagcttatgtcaaagtagacagctgtccagaggaaccccaactacgaatgaaaaataatgaagaagcggaagactatgatgatgatcttactgattctgaaatggatgtggtcaggtttgatgatgacaactctccttcctttatccaaattcgctcagttgccaagaagcatcctaaaacttgggtacattacattgctgctgaagaggaggactgggactatgctcccttagtcctcgcccccgatgacagaagttataaaagtcaatatttgaacaatggccctcagcggattggtaggaagtacaaaaaagtccgatttatggcatacacagatgaaacctttaagactcgtgaagctattcagcatgaatcaggaatcttgggacctttactttatggggaagttggagacacactgttgattatatttaagaatcaagcaagcagaccatataacatctaccctcacggaatcactgatgtccgtcctttgtattcaaggagattaccaaaaggtgtaaaacatttgaaggattttccaattctgccaggagaaatattcaaatataaatggacagtgactgtagaagatgggccaactaaatcagatcctcggtgcctgacccgctattactctagtttcgttaatatggagagagatctagcttcaggactcattggccctctcctcatctgctacaaagaatctgtagatcaaagaggaaaccagataatgtcagacaagaggaatgtcatcctgttttctgtatttgatgagaaccgaagctggtacctcacagagaatatacaacgctttctccccaatccagctggagtgcagcttgaggatccagagttccaagcctccaacatcatgcacagcatcaatggctatgtttttgatagtttgcagttgtcagtttgtttgcatgaggtggcatactggtacattctaagcattggagcacagactgacttcctttctgtcttcttctctggatataccttcaaacacaaaatggtctatgaagacacactcaccctattcccattctcaggagaaactgtcttcatgtcgatggaaaacccaggtctatggattctggggtgccacaactcagactttcggaacagaggcatgaccgccttactgaaggtttctagttgtgacaagaacactggtgattattacgaggacagttatgaagatatttcagcatacttgctgagtaaaaacaatgccattgaaccaagaagcttctctcaaaacggcgcgccaagtcccgctggaagcccaactagcaccgaagaggggacctcagagtccgccacccccgagtccggccctggctctgagcctgccactagcggctccgagactcctggcacatccgaaagcgctacacccgagagtggacccggcacctctaccgagcccagtgagggctccgcccctggaacaagcaccgagcccagcgaaggcagcgccccagggacctccacagagcccagtgaaggcagtgctcctggcaccagcaccgaaccaagcgagggctctgcacccgggacctccaccgagccaagcgaaggctctgcccctggcacttccaccgagcccagcgaaggcagcgcccctgggagccccgctggctctcccaccagcactgaggagggcacatctaccgaaccaagtgaaggctctgcaccaggtgcctcgagcccaccagtcttgaaacgccatcaagctgaaataactcgtactactcttcagtcagatcaagaggaaatcgattatgatgataccatatcagttgaaatgaagaaggaagattttgacatttatgatgaggatgaaaatcagagcccccgcagctttcaaaagaaaacacgacactattttattgctgcagtggagaggctctgggattatgggatgagtagctccccacatgttctaagaaacagggctcagagtggcagtgtccctcagttcaagaaagttgttttccaggaatttactgatggctcctttactcagcccttataccgtggagaactaaatgaacatttgggactcctggggccatatataagagcagaagttgaagataatatcatggtaactttcagaaatcaggcctctcgtccctattccttctattctagccttatttcttatgaggaagatcagaggcaaggagcagaacctagaaaaaactttgtcaagcctaatgaaaccaaaacttacttttggaaagtgcaacatcatatggcacccactaaagatgagtttgactgcaaagcctgggcttatttctctgatgttgacctggaaaaagatgtgcactcaggcctgattggaccccttctggtctgccacactaacacactgaaccctgctcatgggagacaagtgacagtacaggaatttgctctgtttttcaccatctttgatgagaccaaaagctggtacttcactgaaaatatggaaagaaactgcagggctccctgcaatatccagatggaagatcccacttttaaagagaattatcgcttccatgcaatcaatggctacataatggatacactacctggcttagtaatggctcaggatcaaaggattcgatggtatctgctcagcatgggcagcaatgaaaacatccattctattcatttcagtggacatgtgttcactgtacgaaaaaaagaggagtataaaatggcactgtacaatctctatccaggtgtttttgagacagtggaaatgttaccatccaaagctggaatttggcgggtggaatgccttattggcgagcatctacatgctgggatgagcacactttttctggtgtacagcaataagtgtcagactcccctgggaatggcttctggacacattagagattttcagattacagcttcaggacaatatggacagtgggccccaaagctggccagacttcattattccggatcaatcaatgcctggagcaccaaggagcccttttcttggatcaaggtggatctgttggcaccaatgattattcacggcatcaagacccagggtgcccgtcagaagttctccagcctctacatctctcagtttatcatcatgtatagtcttgatgggaagaagtggcagacttatcgaggaaattccactggaaccttaatggtcttctttggcaatgtggattcatctgggataaaacacaatatttttaaccctccaattattgctcgatacatccgtttgcacccaactcattatagcattcgcagcactcttcgcatggagttgatgggctgtgatttaaatagttgcagcatgccattgggaatggagagtaaagcaatatcagatgcacagattactgcttcatcctactttaccaatatgtttgccacctggtctccttcaaaagctcgacttcacctccaagggaggagtaatgcctggagacctcaggtgaataatccaaaagagtggctgcaagtggacttccagaagacaatgaaagtcacaggagtaactactcagggagtaaaatctctgcttaccagcatgtatgtgaaggagttcctcatctccagcagtcaagatggccatcagtggactctcttttttcagaatggcaaagtaaaggtttttcagggaaatcaagactccttcacacctgtggtgaactctctagacccaccgttactgactcgctaccttcgaattcacccccagagttgggtgcaccagattgccctgaggatggaggttctgggctgcgaggcacaggacctctacggcgcgccaggtacctcagagtctgctacccccgagtcagggccaggatcagagccagccacctccgggtctgagacacccgggacttccgagagtgccacccctgagtccggacccgggtccgagcccgccacttccggctccgaaactcccggcacaagcgagagcgctaccccagagtcaggaccaggaacatctacagagccctctgaaggctccgctccagggtccccagccggcagtcccactagcaccgaggagggaacctctgaaagcgccacacccgaatcagggccagggtctgagcctgctaccagcggcagcgagacaccaggcacctctgagtccgccacaccagagtccggacccggatctcccgctgggagccccacctccactgaggagggatctcctgctggctctccaacatctactgaggaaggtacctcaaccgagccatccgagggatcagctcccggcacctcagagtcggcaaccccggagtctggacccggaacttccgaaagtgccacaccagagtccggtcccgggacttcagaatcagcaacacccgagtccggccctgggtctgaacccgccacaagtggtagtgagacaccaggatcagaacctgctacctcagggtcagagacacccggatctccggcaggctcaccaacctccactgaggagggcaccagcacagaaccaagcgagggctccgcacccggaacaagcactgaacccagtgagggttcagcacccggctctgagccggccacaagtggcagtgagacacccggcacttcagagagtgccacccccgagagtggcccaggcactagtaccgagccctctgaaggcagtgcgccagcctcgagcgaacaaaaactcatctcagaagaggatctgtcacctgcaaccggtcatcatcaccatcaccattga

SEQ ID NO: 1079 - protein, 2053 aa, synthetic construct
  REGION 1..2053: note = Description of Artificial Sequence: Synthetic polypeptide
ATRRYYLGAVELSWDYMQSDLGELPVDARFPPRVPKSFPFGAPGSSPSASTGTGPGSSPSASTGTGPGASPGTSSTGSPGASPGTSSTGSPGSSTPSGATGSPGSSPSASTGTGPGASPGTSSTGSPGSSPSASTGTGPGTPGSGTASSSPGSSTPSGATGSPGSSTPSGATGSPGASPGTSSTGSPASSNTSVVYKKTLFVEFTDHLFNIAKPRPPWMGLLGPTIQAEVYDTVVITLKNMASHPVSLHAVGVSYWKASEGAEYDDQTSQREKEDDKVFPGGSHTYVWQVLKENGPMASDPLCLTYSYLSHVDLVKDLNSGLIGALLVCREGSLAKEKTQTLHKFILLFAVFDEGKSWHSETKNSLMQDRDAASARAWPKMHTVNGYVNRSLPGLIGCHRKSVYWHVIGMGTTPEVHSIFLEGHTFLVRNHRQASLEISPITFLTAQTLLMDLGQFLLFCHISSHQHDGMEAYVKVDSCPEEPQLRMKNNEEAEDYDDDLTDSEMDVVRFDDDNSPSFIQIRSVAKKHPKTWVHYIAAEEEDWDYAPLVLAPDDRSYKSQYLNNGPQRIGRKYKKVRFMAYTDETFKTREAIQHESGILGPLLYGEVGDTLLIIFKNQASRPYNIYPHGITDVRPLYSRRLPKGVKHLKDFPILPGEIFKYKWTVTVEDGPTKSDPRCLTRYYSSFVNMERDLASGLIGPLLICYKESVDQRGNQIMSDKRNVILFSVFDENRSWYLTENIQRFLPNPAGVQLEDPEFQASNIMHSINGYVFDSLQLSVCLHEVAYWYILSIGAQTDFLSVFFSGYTFKHKMVYEDTLTLFPFSGETVFMSMENPGLWILGCHNSDFRNRGMTALLKVSSCDKNTGDYYEDSYEDISAYLLSKNNAIEPRSFSQNGAPSPAGSPTSTEEGTSESATPESGPGSEPATSGSETPGTSESATPESGPGTSTEPSEGSAPGTSTEPSEGSAPGTSTEPSEGSAPGTSTEPSEGSAPGTSTEPSEGSAPGTSTEPSEGSAPGSPAGSPTSTEEGTSTEPSEGSAPGASSPPVLKRHQREITRTTLQSDQEEIDYDDTISVEMKKEDFDIYDEDENQSPRSFQKKTRHYFIAAVERLWDYGMSSSPHVLRNRAQSGSVPQFKKVVFQEFTDGSFTQPLYRGELNEHLGLLGPYIRAEVEDNIMVTFRNQASRPYSFYSSLISYEEDQRQGAEPRKNFVKPNETKTYFWKVQHHMAPTKDEFDCKAWAYFSDVDLEKDVHSGLIGPLLVCHTNTLNPAHGRQVTVQEFALFFTIFDETKSWYFTENMERNCRAPCNIQMEDPTFKENYRFHAINGYIMDTLPGLVMAQDQRIRWYLLSMGSNENIHSIHFSGHVFTVRKKEEYKMALYNLYPGVFETVEMLPSKAGIWRVECLIGEHLHAGMSTLFLVYSNKCQTPLGMASGHIRDFQITASGQYGQWAPKLARLHYSGSINAWSTKEPFSWIKVDLLAPMIIHGIKTQGARQKFSSLYISQFIIMYSLDGKKWQTYRGNSTGTLMVFFGNVDSSGIKHNIFNPPIIARYIRLHPTHYSIRSTLRMELMGCDLNSCSMPLGMESKAISDAQITASSYFTNMFATWSPSKARLHLQGRSNAWRPQVNNPKEWLQVDFQKTMKVTGVTTQGVKSLLTSMYVKEFLISSSQDGHQWTLFFQNGKVKVFQGNQDSFTPVVNSLDPPLLTRYLRIHPQSWVHQIALRMEVLGCEAQDLYGAPGTSESATPESGPGSEPATSGSETPGTSESATPESGPGSEPATSGSETPGTSESATPESGPGTSTEPSEGSAPGSPAGSPTSTEEGTSESATPESGPGSEPATSGSETPGTSESATPESGPGSPAGSPTSTEEGSPAGSPTSTEEGTSTEPSEGSAPGTSESATPESGPGTSESATPESGPGTSESATPESGPGSEPATSGSETPGSEPATSGSETPGSPAGSPTSTEEGTSTEPSEGSAPGTSTEPSEGSAPGSEPATSGSETPGTSESATPESGPGTSTEPSEGSAPASSEQKLISEEDLSPATGHHHHHH

SEQ ID NO: 1080 - DNA, 6162 bp, synthetic construct
  misc_feature 1..6162: note = Description of Artificial Sequence: Synthetic polynucleotide
  source 1..6162: mol_type = other DNA
gccaccagaagatactacctgggtgcagtggaactgtcatgggactatatgcaaagtgatctcggtgagctgcctgtggacgcaagatttcctcctagagtgccaaaatcttttccattcggcgcgccaggctccagcccctccgcgagcacgggaaccggaccaggttcgtcaccctcagcatcaacggggacgggaccgggggcgtcaccaggaacgtcctccaccggctcgccgggtgcatcacccggaacgtcatcgaccggatcgccagggagctcgacgccatcaggcgcaacaggatcacctggctcaagccctagcgcgtcaaccggcacgggtccgggtgcctcccctggcacgtccagcaccggatcacccggatcgagcccatccgcctcaaccggaaccggacccggtacaccagggtcgggaacagcctcctcgtcaccaggctcctcaaccccctcgggagccacgggttcgcccggttcgtcaacgccttccggagcaactggtagccccggagcatcgccaggaacttcgagcacggggtcgcccgcctcgagcaacacctcagtcgtgtacaaaaagactctgtttgtagaattcacggatcaccttttcaacatcgctaagccaaggccaccctggatgggtctgctaggtcctaccatccaggctgaggtttatgatacagtggtcattacacttaagaacatggcttcccatcctgtcagtcttcatgctgttggtgtatcctactggaaagcttctgagggagctgaatatgatgatcagaccagtcaaagggagaaagaagatgataaagtcttccctggtggaagccatacatatgtctggcaggtcctgaaagagaatggtccaatggcctctgacccactgtgccttacctactcatatctttctcatgtggacctggtaaaagacttgaattcaggcctcattggagccctactagtatgtagagaagggagtctggccaaggaaaagacacagaccttgcacaaatttatactactttttgctgtatttgatgaagggaaaagttggcactcagaaacaaagaactccttgatgcaggatagggatgctgcatctgctcgggcctggcctaaaatgcacacagtcaatggttatgtaaacaggtctctgccaggtctgattggatgccacaggaaatcagtctattggcatgtgattggaatgggcaccactcctgaagtgcactcaatattcctcgaaggtcacacatttcttgtgaggaaccatcgccaggctagcttggaaatctcgccaataactttccttactgctcaaacactcttgatggaccttggacagtttctactgttttgtcatatctcttcccaccaacatgatggcatggaagcttatgtcaaagtagacagctgtccagaggaaccccaactacgaatgaaaaataatgaagaagcggaagactatgatgatgatcttactgattctgaaatggatgtggtcaggtttgatgatgacaactctccttcctttatccaaattcgctcagttgccaagaagcatcctaaaacttgggtacattacattgctgctgaagaggaggactgggactatgctcccttagtcctcgcccccgatgacagaagttataaaagtcaatatttgaacaatggccctcagcggattggtaggaagtacaaaaaagtccgatttatggcatacacagatgaaacctttaagactcgtgaagctattcagcatgaatcaggaatcttgggacctttactttatggggaagttggagacacactgttgattatatttaagaatcaagcaagcagaccatataacatctaccctcacggaatcactgatgtccgtcctttgtattcaaggagattaccaaaaggtgtaaaacatttgaaggattttccaattctgccaggagaaatattcaaatataaatggacagtgactgtagaagatgggccaactaaatcagatcctcggtgcctgacccgctattactctagtttcgttaatatggagagagatctagcttcaggactcattggccctctcctcatctgctacaaagaatctgtagatcaaagaggaaaccagataatgtcagacaagaggaatgtcatcctgttttctgtatttgatgagaaccgaagctggtacctcacagagaatatacaacgctttctccccaatccagctggagtgcagcttgaggatccagagttccaagcctccaacatcatgcacagcatcaatggctatgtttttgatagtttgcagttgtcagtttgtttgcatgaggtggcatactggtacattctaagcattggagcacagactgacttcctttctgtcttcttctctggatataccttcaaacacaaaatggtctatgaagacacactcaccctattcccattctcaggagaaactgtcttcatgtcgatggaaaacccaggtctatggattctggggtgccacaactcagactttcggaacagaggcatgaccgccttactgaaggtttctagttgtgacaagaacactggtgattattacgaggacagttatgaagatatttcagcatacttgctgagtaaaaacaatgccattgaaccaagaagcttctctcaaaacggcgcgccaagtcccgctggaagcccaactagcaccgaagaggggacctcagagtccgccacccccgagtccggccctggctctgagcctgccactagcggctccgagactcctggcacatccgaaagcgctacacccgagagtggacccggcacctctaccgagcccagtgagggctccgcccctggaacaagcaccgagcccagcgaaggcagcgccccagggacctccacagagcccagtgaaggcagtgctcctggcaccagcaccgaaccaagcgagggctctgcacccgggacctccaccgagccaagcgaaggctctgcccctggcacttccaccgagcccagcgaaggcagcgcccctgggagccccgctggctctcccaccagcactgaggagggcacatctaccgaaccaagtgaaggctctgcaccaggtgcctcgagcccaccagtcttgaaacgccatcaacgggaaataactcgtactactcttcagtcagatcaagaggaaatcgattatgatgataccatatcagttgaaatgaagaaggaagattttgacatttatgatgaggatgaaaatcagagcccccgcagctttcaaaagaaaacacgacactattttattgctgcagtggagaggctctgggattatgggatgagtagctccccacatgttctaagaaacagggctcagagtggcagtgtccctcagttcaagaaagttgttttccaggaatttactgatggctcctttactcagcccttataccgtggagaactaaatgaacatttgggactcctggggccatatataagagcagaagttgaagataatatcatggtaactttcagaaatcaggcctctcgtccctattccttctattctagccttatttcttatgaggaagatcagaggcaaggagcagaacctagaaaaaactttgtcaagcctaatgaaaccaaaacttacttttggaaagtgcaacatcatatggcacccactaaagatgagtttgactgcaaagcctgggcttatttctctgatgttgacctggaaaaagatgtgcactcaggcctgattggaccccttctggtctgccacactaacacactgaaccctgctcatgggagacaagtgacagtacaggaatttgctctgtttttcaccatctttgatgagaccaaaagctggtacttcactgaaaatatggaaagaaactgcagggctccctgcaatatccagatggaagatcccacttttaaagagaattatcgcttccatgcaatcaatggctacataatggatacactacctggcttagtaatggctcaggatcaaaggattcgatggtatctgctcagcatgggcagcaatgaaaacatccattctattcatttcagtggacatgtgttcactgtacgaaaaaaagaggagtataaaatggcactgtacaatctctatccaggtgtttttgagacagtggaaatgttaccatccaaagctggaatttggcgggtggaatgccttattggcgagcatctacatgctgggatgagcacactttttctggtgtacagcaataagtgtcagactcccctgggaatggcttctggacacattagagattttcagattacagcttcaggacaatatggacagtgggccccaaagctggccagacttcattattccggatcaatcaatgcctggagcaccaaggagcccttttcttggatcaaggtggatctgttggcaccaatgattattcacggcatcaagacccagggtgcccgtcagaagttctccagcctctacatctctcagtttatcatcatgtatagtcttgatgggaagaagtggcagacttatcgaggaaattccactggaaccttaatggtcttctttggcaatgtggattcatctgggataaaacacaatatttttaaccctccaattattgctcgatacatccgtttgcacccaactcattatagcattcgcagcactcttcgcatggagttgatgggctgtgatttaaatagttgcagcatgccattgggaatggagagtaaagcaatatcagatgcacagattactgcttcatcctactttaccaatatgtttgccacctggtctccttcaaaagctcgacttcacctccaagggaggagtaatgcctggagacctcaggtgaataatccaaaagagtggctgcaagtggacttccagaagacaatgaaagtcacaggagtaactactcagggagtaaaatctctgcttaccagcatgtatgtgaaggagttcctcatctccagcagtcaagatggccatcagtggactctcttttttcagaatggcaaagtaaaggtttttcagggaaatcaagactccttcacacctgtggtgaactctctagacccaccgttactgactcgctaccttcgaattcacccccagagttgggtgcaccagattgccctgaggatggaggttctgggctgcgaggcacaggacctctacggcgcgccaggtacctcagagtctgctacccccgagtcagggccaggatcagagccagccacctccgggtctgagacacccgggacttccgagagtgccacccctgagtccggacccgggtccgagcccgccacttccggctccgaaactcccggcacaagcgagagcgctaccccagagtcaggaccaggaacatctacagagccctctgaaggctccgctccagggtccccagccggcagtcccactagcaccgaggagggaacctctgaaagcgccacacccgaatcagggccagggtctgagcctgctaccagcggcagcgagacaccaggcacctctgagtccgccacaccagagtccggacccggatctcccgctgggagccccacctccactgaggagggatctcctgctggctctccaacatctactgaggaaggtacctcaaccgagccatccgagggatcagctcccggcacctcagagtcggcaaccccggagtctggacccggaacttccgaaagtgccacaccagagtccggtcccgggacttcagaatcagcaacacccgagtccggccctgggtctgaacccgccacaagtggtagtgagacaccaggatcagaacctgctacctcagggtcagagacacccggatctccggcaggctcaccaacctccactgaggagggcaccagcacagaaccaagcgagggctccgcacccggaacaagcactgaacccagtgagggttcagcacccggctctgagccggccacaagtggcagtgagacacccggcacttcagagagtgccacccccgagagtggcccaggcactagtaccgagccctctgaaggcagtgcgccagcctcgagcgaacaaaaactcatctcagaagaggatctgtcacctgcaaccggtcatcatcaccatcaccattga

SEQ ID NO: 1081 - protein, 2053 aa, synthetic construct
  REGION 1..2053: note = Description of Artificial Sequence: Synthetic polypeptide
ATRRYYLGAVELSWDYMQGAPGSSPSASTGTGPGSSPSASTGTGPGASPGTSSTGSPGASPGTSSTGSPGSSTPSGATGSPGSSPSASTGTGPGASPGTSSTGSPGSSPSASTGTGPGTPGSGTASSSPGSSTPSGATGSPGSSTPSGATGSPGASPGTSSTGSPASSSDLGELPVDARFPPRVPKSFPFNTSVVYKKTLFVEFTDHLFNIAKPRPPWMGLLGPTIQAEVYDTVVITLKNMASHPVSLHAVGVSYWKASEGAEYDDQTSQREKEDDKVFPGGSHTYVWQVLKENGPMASDPLCLTYSYLSHVDLVKDLNSGLIGALLVCREGSLAKEKTQTLHKFILLFAVFDEGKSWHSETKNSLMQDRDAASARAWPKMHTVNGYVNRSLPGLIGCHRKSVYWHVIGMGTTPEVHSIFLEGHTFLVRNHRQASLEISPITFLTAQTLLMDLGQFLLFCHISSHQHDGMEAYVKVDSCPEEPQLRMKNNEEAEDYDDDLTDSEMDVVRFDDDNSPSFIQIRSVAKKHPKTWVHYIAAEEEDWDYAPLVLAPDDRSYKSQYLNNGPQRIGRKYKKVRFMAYTDETFKTREAIQHESGILGPLLYGEVGDTLLIIFKNQASRPYNIYPHGITDVRPLYSRRLPKGVKHLKDFPILPGEIFKYKWTVTVEDGPTKSDPRCLTRYYSSFVNMERDLASGLIGPLLICYKESVDQRGNQIMSDKRNVILFSVFDENRSWYLTENIQRFLPNPAGVQLEDPEFQASNIMHSINGYVFDSLQLSVCLHEVAYWYILSIGAQTDFLSVFFSGYTFKHKMVYEDTLTLFPFSGETVFMSMENPGLWILGCHNSDFRNRGMTALLKVSSCDKNTGDYYEDSYEDISAYLLSKNNAIEPRSFSQNGAPSPAGSPTSTEEGTSESATPESGPGSEPATSGSETPGTSESATPESGPGTSTEPSEGSAPGTSTEPSEGSAPGTSTEPSEGSAPGTSTEPSEGSAPGTSTEPSEGSAPGTSTEPSEGSAPGSPAGSPTSTEEGTSTEPSEGSAPGASSPPVLKRHQREITRTTLQSDQEEIDYDDTISVEMKKEDFDIYDEDENQSPRSFQKKTRHYFIAAVERLWDYGMSSSPHVLRNRAQSGSVPQFKKVVFQEFTDGSFTQPLYRGELNEHLGLLGPYIRAEVEDNIMVTFRNQASRPYSFYSSLISYEEDQRQGAEPRKNFVKPNETKTYFWKVQHHMAPTKDEFDCKAWAYFSDVDLEKDVHSGLIGPLLVCHTNTLNPAHGRQVTVQEFALFFTIFDETKSWYFTENMERNCRAPCNIQMEDPTFKENYRFHAINGYIMDTLPGLVMAQDQRIRWYLLSMGSNENIHSIHFSGHVFTVRKKEEYKMALYNLYPGVFETVEMLPSKAGIWRVECLIGEHLHAGMSTLFLVYSNKCQTPLGMASGHIRDFQITASGQYGQWAPKLARLHYSGSINAWSTKEPFSWIKVDLLAPMIIHGIKTQGARQKFSSLYISQFIIMYSLDGKKWQTYRGNSTGTLMVFFGNVDSSGIKHNIFNPPIIARYIRLHPTHYSIRSTLRMELMGCDLNSCSMPLGMESKAISDAQITASSYFTNMFATWSPSKARLHLQGRSNAWRPQVNNPKEWLQVDFQKTMKVTGVTTQGVKSLLTSMYVKEFLISSSQDGHQWTLFFQNGKVKVFQGNQDSFTPVVNSLDPPLLTRYLRIHPQSWVHQIALRMEVLGCEAQDLYGAPGTSESATPESGPGSEPATSGSETPGTSESATPESGPGSEPATSGSETPGTSESATPESGPGTSTEPSEGSAPGSPAGSPTSTEEGTSESATPESGPGSEPATSGSETPGTSESATPESGPGSPAGSPTSTEEGSPAGSPTSTEEGTSTEPSEGSAPGTSESATPESGPGTSESATPESGPGTSESATPESGPGSEPATSGSETPGSEPATSGSETPGSPAGSPTSTEEGTSTEPSEGSAPGTSTEPSEGSAPGSEPATSGSETPGTSESATPESGPGTSTEPSEGSAPASSEQKLISEEDLSPATGHHHHHH

SEQ ID NO: 1082 - DNA, 6162 bp, synthetic construct
  misc_feature 1..6162: note = Description of Artificial Sequence: Synthetic polynucleotide
  source 1..6162: mol_type = other DNA
gccaccagaagatactacctgggtgcagtggaactgtcatgggactatatgcaaggcgcgccaggctccagcccctccgcgagcacgggaaccggaccaggttcgtcaccctcagcatcaacggggacgggaccgggggcgtcaccaggaacgtcctccaccggctcgccgggtgcatcacccggaacgtcatcgaccggatcgccagggagctcgacgccatcaggcgcaacaggatcacctggctcaagccctagcgcgtcaaccggcacgggtccgggtgcctcccctggcacgtccagcaccggatcacccggatcgagcccatccgcctcaaccggaaccggacccggtacaccagggtcgggaacagcctcctcgtcaccaggctcctcaaccccctcgggagccacgggttcgcccggttcgtcaacgccttccggagcaactggtagccccggagcatcgccaggaacttcgagcacggggtcgcccgcctcgagcagtgatctcggtgagctgcctgtggacgcaagatttcctcctagagtgccaaaatcttttccattcaacacctcagtcgtgtacaaaaagactctgtttgtagaattcacggatcaccttttcaacatcgctaagccaaggccaccctggatgggtctgctaggtcctaccatccaggctgaggtttatgatacagtggtcattacacttaagaacatggcttcccatcctgtcagtcttcatgctgttggtgtatcctactggaaagcttctgagggagctgaatatgatgatcagaccagtcaaagggagaaagaagatgataaagtcttccctggtggaagccatacatatgtctggcaggtcctgaaagagaatggtccaatggcctctgacccactgtgccttacctactcatatctttctcatgtggacctggtaaaagacttgaattcaggcctcattggagccctactagtatgtagagaagggagtctggccaaggaaaagacacagaccttgcacaaatttatactactttttgctgtatttgatgaagggaaaagttggcactcagaaacaaagaactccttgatgcaggatagggatgctgcatctgctcgggcctggcctaaaatgcacacagtcaatggttatgtaaacaggtctctgccaggtctgattggatgccacaggaaatcagtctattggcatgtgattggaatgggcaccactcctgaagtgcactcaatattcctcgaaggtcacacatttcttgtgaggaaccatcgccaggctagcttggaaatctcgccaataactttccttactgctcaaacactcttgatggaccttggacagtttctactgttttgtcatatctcttcccaccaacatgatggcatggaagcttatgtcaaagtagacagctgtccagaggaaccccaactacgaatgaaaaataatgaagaagcggaagactatgatgatgatcttactgattctgaaatggatgtggtcaggtttgatgatgacaactctccttcctttatccaaattcgctcagttgccaagaagcatcctaaaacttgggtacattacattgctgctgaagaggaggactgggactatgctcccttagtcctcgcccccgatgacagaagttataaaagtcaatatttgaacaatggccctcagcggattggtaggaagtacaaaaaagtccgatttatggcatacacagatgaaacctttaagactcgtgaagctattcagcatgaatcaggaatcttgggacctttactttatggggaagttggagacacactgttgattatatttaagaatcaagcaagcagaccatataacatctaccctcacggaatcactgatgtccgtcctttgtattcaaggagattaccaaaaggtgtaaaacatttgaaggattttccaattctgccaggagaaatattcaaatataaatggacagtgactgtagaagatgggccaactaaatcagatcctcggtgcctgacccgctattactctagtttcgttaatatggagagagatctagcttcaggactcattggccctctcctcatctgctacaaagaatctgtagatcaaagaggaaaccagataatgtcagacaagaggaatgtcatcctgttttctgtatttgatgagaaccgaagctggtacctcacagagaatatacaacgctttctccccaatccagctggagtgcagcttgaggatccagagttccaagcctccaacatcatgcacagcatcaatggctatgtttttgatagtttgcagttgtcagtttgtttgcatgaggtggcatactggtacattctaagcattggagcacagactgacttcctttctgtcttcttctctggatataccttcaaacacaaaatggtctatgaagacacactcaccctattcccattctcaggagaaactgtcttcatgtcgatggaaaacccaggtctatggattctggggtgccacaactcagactttcggaacagaggcatgaccgccttactgaaggtttctagttgtgacaagaacactggtgattattacgaggacagttatgaagatatttcagcatacttgctgagtaaaaacaatgccattgaaccaagaagcttctctcaaaacggcgcgccaagtcccgctggaagcccaactagcaccgaagaggggacctcagagtccgccacccccgagtccggccctggctctgagcctgccactagcggctccgagactcctggcacatccgaaagcgctacacccgagagtggacccggcacctctaccgagcccagtgagggctccgcccctggaacaagcaccgagcccagcgaaggcagcgccccagggacctccacagagcccagtgaaggcagtgctcctggcaccagcaccgaaccaagcgagggctctgcacccgggacctccaccgagccaagcgaaggctctgcccctggcacttccaccgagcccagcgaaggcagcgcccctgggagccccgctggctctcccaccagcactgaggagggcacatctaccgaaccaagtgaaggctctgcaccaggtgcctcgagcccaccagtcttgaaacgccatcaacgggaaataactcgtactactcttcagtcagatcaagaggaaatcgattatgatgataccatatcagttgaaatgaagaaggaagattttgacatttatgatgaggatgaaaatcagagcccccgcagctttcaaaagaaaacacgacactattttattgctgcagtggagaggctctgggattatgggatgagtagctccccacatgttctaagaaacagggctcagagtggcagtgtccctcagttcaagaaagttgttttccaggaatttactgatggctcctttactcagcccttataccgtggagaactaaatgaacatttgggactcctggggccatatataagagcagaagttgaagataatatcatggtaactttcagaaatcaggcctctcgtccctattccttctattctagccttatttcttatgaggaagatcagaggcaaggagcagaacctagaaaaaactttgtcaagcctaatgaaaccaaaacttacttttggaaagtgcaacatcatatggcacccactaaagatgagtttgactgcaaagcctgggcttatttctctgatgttgacctggaaaaagatgtgcactcaggcctgattggaccccttctggtctgccacactaacacactgaaccctgctcatgggagacaagtgacagtacaggaatttgctctgtttttcaccatctttgatgagaccaaaagctggtacttcactgaaaatatggaaagaaactgcagggctccctgcaatatccagatggaagatcccacttttaaagagaattatcgcttccatgcaatcaatggctacataatggatacactacctggcttagtaatggctcaggatcaaaggattcgatggtatctgctcagcatgggcagcaatgaaaacatccattctattcatttcagtggacatgtgttcactgtacgaaaaaaagaggagtataaaatggcactgtacaatctctatccaggtgtttttgagacagtggaaatgttaccatccaaagctggaatttggcgggtggaatgccttattggcgagcatctacatgctgggatgagcacactttttctggtgtacagcaataagtgtcagactcccctgggaatggcttctggacacattagagattttcagattacagcttcaggacaatatggacagtgggccccaaagctggccagacttcattattccggatcaatcaatgcctggagcaccaaggagcccttttcttggatcaaggtggatctgttggcaccaatgattattcacggcatcaagacccagggtgcccgtcagaagttctccagcctctacatctctcagtttatcatcatgtatagtcttgatgggaagaagtggcagacttatcgaggaaattccactggaaccttaatggtcttctttggcaatgtggattcatctgggataaaacacaatatttttaaccctccaattattgctcgatacatccgtttgcacccaactcattatagcattcgcagcactcttcgcatggagttgatgggctgtgatttaaatagttgcagcatgccattgggaatggagagtaaagcaatatcagatgcacagattactgcttcatcctactttaccaatatgtttgccacctggtctccttcaaaagctcgacttcacctccaagggaggagtaatgcctggagacctcaggtgaataatccaaaagagtggctgcaagtggacttccagaagacaatgaaagtcacaggagtaactactcagggagtaaaatctctgcttaccagcatgtatgtgaaggagttcctcatctccagcagtcaagatggccatcagtggactctcttttttcagaatggcaaagtaaaggtttttcagggaaatcaagactccttcacacctgtggtgaactctctagacccaccgttactgactcgctaccttcgaattcacccccagagttgggtgcaccagattgccctgaggatggaggttctgggctgcgaggcacaggacctctacggcgcgccaggtacctcagagtctgctacccccgagtcagggccaggatcagagccagccacctccgggtctgagacacccgggacttccgagagtgccacccctgagtccggacccgggtccgagcccgccacttccggctccgaaactcccggcacaagcgagagcgctaccccagagtcaggaccaggaacatctacagagccctctgaaggctccgctccagggtccccagccggcagtcccactagcaccgaggagggaacctctgaaagcgccacacccgaatcagggccagggtctgagcctgctaccagcggcagcgagacaccaggcacctctgagtccgccacaccagagtccggacccggatctcccgctgggagccccacctccactgaggagggatctcctgctggctctccaacatctactgaggaaggtacctcaaccgagccatccgagggatcagctcccggcacctcagagtcggcaaccccggagtctggacccggaacttccgaaagtgccacaccagagtccggtcccgggacttcagaatcagcaacacccgagtccggccctgggtctgaacccgccacaagtggtagtgagacaccaggatcagaacctgctacctcagggtcagagacacccggatctccggcaggctcaccaacctccactgaggagggcaccagcacagaaccaagcgagggctccgcacccggaacaagcactgaacccagtgagggttcagcacccggctctgagccggccacaagtggcagtgagacacccggcacttcagagagtgccacccccgagagtggcccaggcactagtaccgagccctctgaaggcagtgcgccagcctcgagcgaacaaaaactcatctcagaagaggatctgtcacctgcaaccggtcatcatcaccatcaccattga

SEQ ID NO: 1083 - protein, 2053 aa, synthetic construct
  REGION 1..2053: note = Description of Artificial Sequence: Synthetic polypeptide
ATRRYYLGAVELSWDYMQSDLGELPVGAPGSSPSASTGTGPGSSPSASTGTGPGASPGTSSTGSPGASPGTSSTGSPGSSTPSGATGSPGSSPSASTGTGPGASPGTSSTGSPGSSPSASTGTGPGTPGSGTASSSPGSSTPSGATGSPGSSTPSGATGSPGASPGTSSTGSPASSDARFPPRVPKSFPFNTSVVYKKTLFVEFTDHLFNIAKPRPPWMGLLGPTIQAEVYDTVVITLKNMASHPVSLHAVGVSYWKASEGAEYDDQTSQREKEDDKVFPGGSHTYVWQVLKENGPMASDPLCLTYSYLSHVDLVKDLNSGLIGALLVCREGSLAKEKTQTLHKFILLFAVFDEGKSWHSETKNSLMQDRDAASARAWPKMHTVNGYVNRSLPGLIGCHRKSVYWHVIGMGTTPEVHSIFLEGHTFLVRNHRQASLEISPITFLTAQTLLMDLGQFLLFCHISSHQHDGMEAYVKVDSCPEEPQLRMKNNEEAEDYDDDLTDSEMDVVRFDDDNSPSFIQIRSVAKKHPKTWVHYIAAEEEDWDYAPLVLAPDDRSYKSQYLNNGPQRIGRKYKKVRFMAYTDETFKTREAIQHESGILGPLLYGEVGDTLLIIFKNQASRPYNIYPHGITDVRPLYSRRLPKGVKHLKDFPILPGEIFKYKWTVTVEDGPTKSDPRCLTRYYSSFVNMERDLASGLIGPLLICYKESVDQRGNQIMSDKRNVILFSVFDENRSWYLTENIQRFLPNPAGVQLEDPEFQASNIMHSINGYVFDSLQLSVCLHEVAYWYILSIGAQTDFLSVFFSGYTFKHKMVYEDTLTLFPFSGETVFMSMENPGLWILGCHNSDFRNRGMTALLKVSSCDKNTGDYYEDSYEDISAYLLSKNNAIEPRSFSQNGAPSPAGSPTSTEEGTSESATPESGPGSEPATSGSETPGTSESATPESGPGTSTEPSEGSAPGTSTEPSEGSAPGTSTEPSEGSAPGTSTEPSEGSAPGTSTEPSEGSAPGTSTEPSEGSAPGSPAGSPTSTEEGTSTEPSEGSAPGASSPPVLKRHQREITRTTLQSDQEEIDYDDTISVEMKKEDFDIYDEDENQSPRSFQKKTRHYFIAAVERLWDYGMSSSPHVLRNRAQSGSVPQFKKVVFQEFTDGSFTQPLYRGELNEHLGLLGPYIRAEVEDNIMVTFRNQASRPYSFYSSLISYEEDQRQGAEPRKNFVKPNETKTYFWKVQHHMAPTKDEFDCKAWAYFSDVDLEKDVHSGLIGPLLVCHTNTLNPAHGRQVTVQEFALFFTIFDETKSWYFTENMERNCRAPCNIQMEDPTFKENYRFHAINGYIMDTLPGLVMAQDQRIRWYLLSMGSNENIHSIHFSGHVFTVRKKEEYKMALYNLYPGVFETVEMLPSKAGIWRVECLIGEHLHAGMSTLFLVYSNKCQTPLGMASGHIRDFQITASGQYGQWAPKLARLHYSGSINAWSTKEPFSWIKVDLLAPMIIHGIKTQGARQKFSSLYISQFIIMYSLDGKKWQTYRGNSTGTLMVFFGNVDSSGIKHNIFNPPIIARYIRLHPTHYSIRSTLRMELMGCDLNSCSMPLGMESKAISDAQITASSYFTNMFATWSPSKARLHLQGRSNAWRPQVNNPKEWLQVDFQKTMKVTGVTTQGVKSLLTSMYVKEFLISSSQDGHQWTLFFQNGKVKVFQGNQDSFTPVVNSLDPPLLTRYLRIHPQSWVHQIALRMEVLGCEAQDLYGAPGTSESATPESGPGSEPATSGSETPGTSESATPESGPGSEPATSGSETPGTSESATPESGPGTSTEPSEGSAPGSPAGSPTSTEEGTSESATPESGPGSEPATSGSETPGTSESATPESGPGSPAGSPTSTEEGSPAGSPTSTEEGTSTEPSEGSAPGTSESATPESGPGTSESATPESGPGTSESATPESGPGSEPATSGSETPGSEPATSGSETPGSPAGSPTSTEEGTSTEPSEGSAPGTSTEPSEGSAPGSEPATSGSETPGTSESATPESGPGTSTEPSEGSAPASSEQKLISEEDLSPATGHHHHHH

SEQ ID NO: 1084 - DNA, 6162 bp, synthetic construct
  misc_feature 1..6162: note = Description of Artificial Sequence: Synthetic polynucleotide
  source 1..6162: mol_type = other DNA
gccaccagaagatactacctgggtgcagtggaactgtcatgggactatatgcaaagtgatctcggtgagctgcctgtgggcgcgccaggctccagcccctccgcgagcacgggaaccggaccaggttcgtcaccctcagcatcaacggggacgggaccgggggcgtcaccaggaacgtcctccaccggctcgccgggtgcatcacccggaacgtcatcgaccggatcgccagggagctcgacgccatcaggcgcaacaggatcacctggctcaagccctagcgcgtcaaccggcacgggtccgggtgcctcccctggcacgtccagcaccggatcacccggatcgagcccatccgcctcaaccggaaccggacccggtacaccagggtcgggaacagcctcctcgtcaccaggctcctcaaccccctcgggagccacgggttcgcccggttcgtcaacgccttccggagcaactggtagccccggagcatcgccaggaacttcgagcacggggtcgcccgcctcgagcgacgcaagatttcctcctagagtgccaaaatcttttccattcaacacctcagtcgtgtacaaaaagactctgtttgtagaattcacggatcaccttttcaacatcgctaagccaaggccaccctggatgggtctgctaggtcctaccatccaggctgaggtttatgatacagtggtcattacacttaagaacatggcttcccatcctgtcagtcttcatgctgttggtgtatcctactggaaagcttctgagggagctgaatatgatgatcagaccagtcaaagggagaaagaagatgataaagtcttccctggtggaagccatacatatgtctggcaggtcctgaaagagaatggtccaatggcctctgacccactgtgccttacctactcatatctttctcatgtggacctggtaaaagacttgaattcaggcctcattggagccctactagtatgtagagaagggagtctggccaaggaaaagacacagaccttgcacaaatttatactactttttgctgtatttgatgaagggaaaagttggcactcagaaacaaagaactccttgatgcaggatagggatgctgcatctgctcgggcctggcctaaaatgcacacagtcaatggttatgtaaacaggtctctgccaggtctgattggatgccacaggaaatcagtctattggcatgtgattggaatgggcaccactcctgaagtgcactcaatattcctcgaaggtcacacatttcttgtgaggaaccatcgccaggctagcttggaaatctcgccaataactttccttactgctcaaacactcttgatggaccttggacagtttctactgttttgtcatatctcttcccaccaacatgatggcatggaagcttatgtcaaagtagacagctgtccagaggaaccccaactacgaatgaaaaataatgaagaagcggaagactatgatgatgatcttactgattctgaaatggatgtggtcaggtttgatgatgacaactctccttcctttatccaaattcgctcagttgccaagaagcatcctaaaacttgggtacattacattgctgctgaagaggaggactgggactatgctcccttagtcctcgcccccgatgacagaagttataaaagtcaatatttgaacaatggccctcagcggattggtaggaagtacaaaaaagtccgatttatggcatacacagatgaaacctttaagactcgtgaagctattcagcatgaatcaggaatcttgggacctttactttatggggaagttggagacacactgttgattatatttaagaatcaagcaagcagaccatataacatctaccctcacggaatcactgatgtccgtcctttgtattcaaggagattaccaaaaggtgtaaaacatttgaaggattttccaattctgccaggagaaatattcaaatataaatggacagtgactgtagaagatgggccaactaaatcagatcctcggtgcctgacccgctattactctagtttcgttaatatggagagagatctagcttcaggactcattggccctctcctcatctgctacaaagaatctgtagatcaaagaggaaaccagataatgtcagacaagaggaatgtcatcctgttttctgtatttgatgagaaccgaagctggtacctcacagagaatatacaacgctttctccccaatccagctggagtgcagcttgaggatccagagttccaagcctccaacatcatgcacagcatcaatggctatgtttttgatagtttgcagttgtcagtttgtttgcatgaggtggcatactggtacattctaagcattggagcacagactgacttcctttctgtcttcttctctggatataccttcaaacacaaaatggtctatgaagacacactcaccctattcccattctcaggagaaactgtcttcatgtcgatggaaaacccaggtctatggattctggggtgccacaactcagactttcggaacagaggcatgaccgccttactgaaggtttctagttgtgacaagaacactggtgattattacgaggacagttatgaagatatttcagcatacttgctgagtaaaaacaatgccattgaaccaagaagcttctctcaaaacggcgcgccaagtcccgctggaagcccaactagcaccgaagaggggacctcagagtccgccacccccgagtccggccctggctctgagcctgccactagcggctccgagactcctggcacatccgaaagcgctacacccgagagtggacccggcacctctaccgagcccagtgagggctccgcccctggaacaagcaccgagcccagcgaaggcagcgccccagggacctccacagagcccagtgaaggcagtgctcctggcaccagcaccgaaccaagcgagggctctgcacccgggacctccaccgagccaagcgaaggctctgcccctggcacttccaccgagcccagcgaaggcagcgcccctgggagccccgctggctctcccaccagcactgaggagggcacatctaccgaaccaagtgaaggctctgcaccaggtgcctcgagcccaccagtcttgaaacgccatcaacgggaaataactcgtactactcttcagtcagatcaagaggaaatcgattatgatgataccatatcagttgaaatgaagaaggaagattttgacatttatgatgaggatgaaaatcagagcccccgcagctttcaaaagaaaacacgacactattttattgctgcagtggagaggctctgggattatgggatgagtagctccccacatgttctaagaaacagggctcagagtggcagtgtccctcagttcaagaaagttgttttccaggaatttactgatggctcctttactcagcccttataccgtggagaactaaatgaacatttgggactcctggggccatatataagagcagaagttgaagataatatcatggtaactttcagaaatcaggcctctcgtccctattccttctattctagccttatttcttatgaggaagatcagaggcaaggagcagaacctagaaaaaactttgtcaagcctaatgaaaccaaaacttacttttggaaagtgcaacatcatatggcacccactaaagatgagtttgactgcaaagcctgggcttatttctctgatgttgacctggaaaaagatgtgcactcaggcctgattggaccccttctggtctgccacactaacacactgaaccctgctcatgggagacaagtgacagtacaggaatttgctctgtttttcaccatctttgatgagaccaaaagctggtacttcactgaaaatatggaaagaaactgcagggctccctgcaatatccagatggaagatcccacttttaaagagaattatcgcttccatgcaatcaatggctacataatggatacactacctggcttagtaatggctcaggatcaaaggattcgatggtatctgctcagcatgggcagcaatgaaaacatccattctattcatttcagtggacatgtgttcactgtacgaaaaaaagaggagtataaaatggcactgtacaatctctatccaggtgtttttgagacagtggaaatgttaccatccaaagctggaatttggcgggtggaatgccttattggcgagcatctacatgctgggatgagcacactttttctggtgtacagcaataagtgtcagactcccctgggaatggcttctggacacattagagattttcagattacagcttcaggacaatatggacagtgggccccaaagctggccagacttcattattccggatcaatcaatgcctggagcaccaaggagcccttttcttggatcaaggtggatctgttggcaccaatgattattcacggcatcaagacccagggtgcccgtcagaagttctccagcctctacatctctcagtttatcatcatgtatagtcttgatgggaagaagtggcagacttatcgaggaaattccactggaaccttaatggtcttctttggcaatgtggattcatctgggataaaacacaatatttttaaccctccaattattgctcgatacatccgtttgcacccaactcattatagcattcgcagcactcttcgcatggagttgatgggctgtgatttaaatagttgcagcatgccattgggaatggagagtaaagcaatatcagatgcacagattactgcttcatcctactttaccaatatgtttgccacctggtctccttcaaaagctcgacttcacctccaagggaggagtaatgcctggagacctcaggtgaataatccaaaagagtggctgcaagtggacttccagaagacaatgaaagtcacaggagtaactactcagggagtaaaatctctgcttaccagcatgtatgtgaaggagttcctcatctccagcagtcaagatggccatcagtggactctcttttttcagaatggcaaagtaaaggtttttcagggaaatcaagactccttcacacctgtggtgaactctctagacccaccgttactgactcgctaccttcgaattcacccccagagttgggtgcaccagattgccctgaggatggaggttctgggctgcgaggcacaggacctctacggcgcgccaggtacctcagagtctgctacccccgagtcagggccaggatcagagccagccacctccgggtctgagacacccgggacttccgagagtgccacccctgagtccggacccgggtccgagcccgccacttccggctccgaaactcccggcacaagcgagagcgctaccccagagtcaggaccaggaacatctacagagccctctgaaggctccgctccagggtccccagccggcagtcccactagcaccgaggagggaacctctgaaagcgccacacccgaatcagggccagggtctgagcctgctaccagcggcagcgagacaccaggcacctctgagtccgccacaccagagtccggacccggatctcccgctgggagccccacctccactgaggagggatctcctgctggctctccaacatctactgaggaaggtacctcaaccgagccatccgagggatcagctcccggcacctcagagtcggcaaccccggagtctggacccggaacttccgaaagtgccacaccagagtccggtcccgggacttcagaatcagcaacacccgagtccggccctgggtctgaacccgccacaagtggtagtgagacaccaggatcagaacctgctacctcagggtcagagacacccggatctccggcaggctcaccaacctccactgaggagggcaccagcacagaaccaagcgagggctccgcacccggaacaagcactgaacccagtgagggttcagcacccggctctgagccggccacaagtggcagtgagacacccggcacttcagagagtgccacccccgagagtggcccaggcactagtaccgagccctctgaaggcagtgcgccagcctcgagcgaacaaaaactcatctcagaagaggatctgtcacctgcaaccggtcatcatcaccatcaccattga

SEQ ID NO: 1085 - protein, 2053 aa, synthetic construct
  REGION 1..2053: note = Description of Artificial Sequence: Synthetic polypeptide
ATRRYYLGAVELSWDYMQGAPTSESATPESGPGSEPATSGSETPGTSESATPESGPGSEPATSGSETPGTSESATPESGPGTSTEPSEGSAPGSPAGSPTSTEEGTSESATPESGPGSEPATSGSETPGTSESATPESGPGSPAGSPTSTEEGSPAGSPTSTEEGASSSDLGELPVDARFPPRVPKSFPFNTSVVYKKTLFVEFTDHLFNIAKPRPPWMGLLGPTIQAEVYDTVVITLKNMASHPVSLHAVGVSYWKASEGAEYDDQTSQREKEDDKVFPGGSHTYVWQVLKENGPMASDPLCLTYSYLSHVDLVKDLNSGLIGALLVCREGSLAKEKTQTLHKFILLFAVFDEGKSWHSETKNSLMQDRDAASARAWPKMHTVNGYVNRSLPGLIGCHRKSVYWHVIGMGTTPEVHSIFLEGHTFLVRNHRQASLEISPITFLTAQTLLMDLGQFLLFCHISSHQHDGMEAYVKVDSCPEEPQLRMKNNEEAEDYDDDLTDSEMDVVRFDDDNSPSFIQIRSVAKKHPKTWVHYIAAEEEDWDYAPLVLAPDDRSYKSQYLNNGPQRIGRKYKKVRFMAYTDETFKTREAIQHESGILGPLLYGEVGDTLLIIFKNQASRPYNIYPHGITDVRPLYSRRLPKGVKHLKDFPILPGEIFKYKWTVTVEDGPTKSDPRCLTRYYSSFVNMERDLASGLIGPLLICYKESVDQRGNQIMSDKRNVILFSVFDENRSWYLTENIQRFLPNPAGVQLEDPEFQASNIMHSINGYVFDSLQLSVCLHEVAYWYILSIGAQTDFLSVFFSGYTFKHKMVYEDTLTLFPFSGETVFMSMENPGLWILGCHNSDFRNRGMTALLKVSSCDKNTGDYYEDSYEDISAYLLSKNNAIEPRSFSQNGAPSPAGSPTSTEEGTSESATPESGPGSEPATSGSETPGTSESATPESGPGTSTEPSEGSAPGTSTEPSEGSAPGTSTEPSEGSAPGTSTEPSEGSAPGTSTEPSEGSAPGTSTEPSEGSAPGSPAGSPTSTEEGTSTEPSEGSAPGASSPPVLKRHQREITRTTLQSDQEEIDYDDTISVEMKKEDFDIYDEDENQSPRSFQKKTRHYFIAAVERLWDYGMSSSPHVLRNRAQSGSVPQFKKVVFQEFTDGSFTQPLYRGELNEHLGLLGPYIRAEVEDNIMVTFRNQASRPYSFYSSLISYEEDQRQGAEPRKNFVKPNETKTYFWKVQHHMAPTKDEFDCKAWAYFSDVDLEKDVHSGLIGPLLVCHTNTLNPAHGRQVTVQEFALFFTIFDETKSWYFTENMERNCRAPCNIQMEDPTFKENYRFHAINGYIMDTLPGLVMAQDQRIRWYLLSMGSNENIHSIHFSGHVFTVRKKEEYKMALYNLYPGVFETVEMLPSKAGIWRVECLIGEHLHAGMSTLFLVYSNKCQTPLGMASGHIRDFQITASGQYGQWAPKLARLHYSGSINAWSTKEPFSWIKVDLLAPMIIHGIKTQGARQKFSSLYISQFIIMYSLDGKKWQTYRGNSTGTLMVFFGNVDSSGIKHNIFNPPIIARYIRLHPTHYSIRSTLRMELMGCDLNSCSMPLGMESKAISDAQITASSYFTNMFATWSPSKARLHLQGRSNAWRPQVNNPKEWLQVDFQKTMKVTGVTTQGVKSLLTSMYVKEFLISSSQDGHQWTLFFQNGKVKVFQGNQDSFTPVVNSLDPPLLTRYLRIHPQSWVHQIALRMEVLGCEAQDLYGAPGTSESATPESGPGSEPATSGSETPGTSESATPESGPGSEPATSGSETPGTSESATPESGPGTSTEPSEGSAPGSPAGSPTSTEEGTSESATPESGPGSEPATSGSETPGTSESATPESGPGSPAGSPTSTEEGSPAGSPTSTEEGTSTEPSEGSAPGTSESATPESGPGTSESATPESGPGTSESATPESGPGSEPATSGSETPGSEPATSGSETPGSPAGSPTSTEEGTSTEPSEGSAPGTSTEPSEGSAPGSEPATSGSETPGTSESATPESGPGTSTEPSEGSAPASSEQKLISEEDLSPATGHHHHHH

SEQ ID NO: 1086 - DNA, 6162 bp, synthetic construct
  misc_feature 1..6162: note = Description of Artificial Sequence: Synthetic polynucleotide
  source 1..6162: mol_type = other DNA
gccaccagaagatactacctgggtgcagtggaactgtcatgggactatatgcaaggcgcgccaacatcagagagcgccacccctgaaagtggtcccgggagcgagccagccacatctgggtcggaaacgccaggcacaagtgagtctgcaactcccgagtccggacctggctccgagcctgccactagcggctccgagactccgggaacttccgagagcgctacaccagaaagcggacccggaaccagtaccgaacctagcgagggctctgctccgggcagcccagccggctctcctacatccacggaggagggcacttccgaatccgccaccccggagtcagggccaggatctgaacccgctacctcaggcagtgagacgccaggaacgagcgagtccgctacaccggagagtgggccagggagccctgctggatctcctacgtccactgaggaagggtcaccagcgggctcgcccaccagcactgaagaaggtgcctcgagcagtgatctcggtgagctgcctgtggacgcaagatttcctcctagagtgccaaaatcttttccattcaacacctcagtcgtgtacaaaaagactctgtttgtagaattcacggatcaccttttcaacatcgctaagccaaggccaccctggatgggtctgctaggtcctaccatccaggctgaggtttatgatacagtggtcattacacttaagaacatggcttcccatcctgtcagtcttcatgctgttggtgtatcctactggaaagcttctgagggagctgaatatgatgatcagaccagtcaaagggagaaagaagatgataaagtcttccctggtggaagccatacatatgtctggcaggtcctgaaagagaatggtccaatggcctctgacccactgtgccttacctactcatatctttctcatgtggacctggtaaaagacttgaattcaggcctcattggagccctactagtatgtagagaagggagtctggccaaggaaaagacacagaccttgcacaaatttatactactttttgctgtatttgatgaagggaaaagttggcactcagaaacaaagaactccttgatgcaggatagggatgctgcatctgctcgggcctggcctaaaatgcacacagtcaatggttatgtaaacaggtctctgccaggtctgattggatgccacaggaaatcagtctattggcatgtgattggaatgggcaccactcctgaagtgcactcaatattcctcgaaggtcacacatttcttgtgaggaaccatcgccaggctagcttggaaatctcgccaataactttccttactgctcaaacactcttgatggaccttggacagtttctactgttttgtcatatctcttcccaccaacatgatggcatggaagcttatgtcaaagtagacagctgtccagaggaaccccaactacgaatgaaaaataatgaagaagcggaagactatgatgatgatcttactgattctgaaatggatgtggtcaggtttgatgatgacaactctccttcctttatccaaattcgctcagttgccaagaagcatcctaaaacttgggtacattacattgctgctgaagaggaggactgggactatgctcccttagtcctcgcccccgatgacagaagttataaaagtcaatatttgaacaatggccctcagcggattggtaggaagtacaaaaaagtccgatttatggcatacacagatgaaacctttaagactcgtgaagctattcagcatgaatcaggaatcttgggacctttactttatggggaagttggagacacactgttgattatatttaagaatcaagcaagcagaccatataacatctaccctcacggaatcactgatgtccgtcctttgtattcaaggagattaccaaaaggtgtaaaacatttgaaggattttccaattctgccaggagaaatattcaaatataaatggacagtgactgtagaagatgggccaactaaatcagatcctcggtgcctgacccgctattactctagtttcgttaatatggagagagatctagcttcaggactcattggccctctcctcatctgctacaaagaatctgtagatcaaagaggaaaccagataatgtcagacaagaggaatgtcatcctgttttctgtatttgatgagaaccgaagctggtacctcacagagaatatacaacgctttctccccaatccagctggagtgcagcttgaggatccagagttccaagcctccaacatcatgcacagcatcaatggctatgtttttgatagtttgcagttgtcagtttgtttgcatgaggtggcatactggtacattctaagcattggagcacagactgacttcctttctgtcttcttctctggatataccttcaaacacaaaatggtctatgaagacacactcaccctattcccattctcaggagaaactgtcttcatgtcgatggaaaacccaggtctatggattctggggtgccacaactcagactttcggaacagaggcatgaccgccttactgaaggtttctagttgtgacaagaacactggtgattattacgaggacagttatgaagatatttcagcatacttgctgagtaaaaacaatgccattgaaccaagaagcttctctcaaaacggcgcgccaagtcccgctggaagcccaactagcaccgaagaggggacctcagagtccgccacccccgagtccggccctggctctgagcctgccactagcggctccgagactcctggcacatccgaaagcgctacacccgagagtggacccggcacctctaccgagcccagtgagggctccgcccctggaacaagcaccgagcccagcgaaggcagcgccccagggacctccacagagcccagtgaaggcagtgctcctggcaccagcaccgaaccaagcgagggctctgcacccgggacctccaccgagccaagcgaaggctctgcccctggcacttccaccgagcccagcgaaggcagcgcccctgggagccccgctggctctcccaccagcactgaggagggcacatctaccgaaccaagtgaaggctctgcaccaggtgcctcgagcccaccagtcttgaaacgccatcaacgggaaataactcgtactactcttcagtcagatcaagaggaaatcgattatgatgataccatatcagttgaaatgaagaaggaagattttgacatttatgatgaggatgaaaatcagagcccccgcagctttcaaaagaaaacacgacactattttattgctgcagtggagaggctctgggattatgggatgagtagctccccacatgttctaagaaacagggctcagagtggcagtgtccctcagttcaagaaagttgttttccaggaatttactgatggctcctttactcagcccttataccgtggagaactaaatgaacatttgggactcctggggccatatataagagcagaagttgaagataatatcatggtaactttcagaaatcaggcctctcgtccctattccttctattctagccttatttcttatgaggaagatcagaggcaaggagcagaacctagaaaaaactttgtcaagcctaatgaaaccaaaacttacttttggaaagtgcaacatcatatggcacccactaaagatgagtttgactgcaaagcctgggcttatttctctgatgttgacctggaaaaagatgtgcactcaggcctgattggaccccttctggtctgccacactaacacactgaaccctgctcatgggagacaagtgacagtacaggaatttgctctgtttttcaccatctttgatgagaccaaaagctggtacttcactgaaaatatggaaagaaactgcagggctccctgcaatatccagatggaagatcccacttttaaagagaattatcgcttccatgcaatcaatggctacataatggatacactacctggcttagtaatggctcaggatcaaaggattcgatggtatctgctcagcatgggcagcaatgaaaacatccattctattcatttcagtggacatgtgttcactgtacgaaaaaaagaggagtataaaatggcactgtacaatctctatccaggtgtttttgagacagtggaaatgttaccatccaaagctggaatttggcgggtggaatgccttattggcgagcatctacatgctgggatgagcacactttttctggtgtacagcaataagtgtcagactcccctgggaatggcttctggacacattagagattttcagattacagcttcaggacaatatggacagtgggccccaaagctggccagacttcattattccggatcaatcaatgcctggagcaccaaggagcccttttcttggatcaaggtggatctgttggcaccaatgattattcacggcatcaagacccagggtgcccgtcagaagttctccagcctctacatctctcagtttatcatcatgtatagtcttgatgggaagaagtggcagacttatcgaggaaattccactggaaccttaatggtcttctttggcaatgtggattcatctgggataaaacacaatatttttaaccctccaattattgctcgatacatccgtttgcacccaactcattatagcattcgcagcactcttcgcatggagttgatgggctgtgatttaaatagttgcagcatgccattgggaatggagagtaaagcaatatcagatgcacagattactgcttcatcctactttaccaatatgtttgccacctggtctccttcaaaagctcgacttcacctccaagggaggagtaatgcctggagacctcaggtgaataatccaaaagagtggctgcaagtggacttccagaagacaatgaaagtcacaggagtaactactcagggagtaaaatctctgcttaccagcatgtatgtgaaggagttcctcatctccagcagtcaagatggccatcagtggactctcttttttcagaatggcaaagtaaaggtttttcagggaaatcaagactccttcacacctgtggtgaactctctagacccaccgttactgactcgctaccttcgaattcacccccagagttgggtgcaccagattgccctgaggatggaggttctgggctgcgaggcacaggacctctacggcgcgccaggtacctcagagtctgctacccccgagtcagggccaggatcagagccagccacctccgggtctgagacacccgggacttccgagagtgccacccctgagtccggacccgggtccgagcccgccacttccggctccgaaactcccggcacaagcgagagcgctaccccagagtcaggaccaggaacatctacagagccctctgaaggctccgctccagggtccccagccggcagtcccactagcaccgaggagggaacctctgaaagcgccacacccgaatcagggccagggtctgagcctgctaccagcggcagcgagacaccaggcacctctgagtccgccacaccagagtccggacccggatctcccgctgggagccccacctccactgaggagggatctcctgctggctctccaacatctactgaggaaggtacctcaaccgagccatccgagggatcagctcccggcacctcagagtcggcaaccccggagtctggacccggaacttccgaaagtgccacaccagagtccggtcccgggacttcagaatcagcaacacccgagtccggccctgggtctgaacccgccacaagtggtagtgagacaccaggatcagaacctgctacctcagggtcagagacacccggatctccggcaggctcaccaacctccactgaggagggcaccagcacagaaccaagcgagggctccgcacccggaacaagcactgaacccagtgagggttcagcacccggctctgagccggccacaagtggcagtgagacacccggcacttcagagagtgccacccccgagagtggcccaggcactagtaccgagccctctgaaggcagtgcgccagcctcgagcgaacaaaaactcatctcagaagaggatctgtcacctgcaaccggtcatcatcaccatcaccattga

SEQ ID NO: 1087 - protein, 2053 aa, synthetic construct
  REGION 1..2053: note = Description of Artificial Sequence: Synthetic polypeptide
ATRRYYLGAVELSWDYMQSDLGELPVGAPTSESATPESGPGSEPATSGSETPGTSESATPESGPGSEPATSGSETPGTSESATPESGPGTSTEPSEGSAPGSPAGSPTSTEEGTSESATPESGPGSEPATSGSETPGTSESATPESGPGSPAGSPTSTEEGSPAGSPTSTEEGASSDARFPPRVPKSFPFNTSVVYKKTLFVEFTDHLFNIAKPRPPWMGLLGPTIQAEVYDTVVITLKNMASHPVSLHAVGVSYWKASEGAEYDDQTSQREKEDDKVFPGGSHTYVWQVLKENGPMASDPLCLTYSYLSHVDLVKDLNSGLIGALLVCREGSLAKEKTQTLHKFILLFAVFDEGKSWHSETKNSLMQDRDAASARAWPKMHTVNGYVNRSLPGLIGCHRKSVYWHVIGMGTTPEVHSIFLEGHTFLVRNHRQASLEISPITFLTAQTLLMDLGQFLLFCHISSHQHDGMEAYVKVDSCPEEPQLRMKNNEEAEDYDDDLTDSEMDVVRFDDDNSPSFIQIRSVAKKHPKTWVHYIAAEEEDWDYAPLVLAPDDRSYKSQYLNNGPQRIGRKYKKVRFMAYTDETFKTREAIQHESGILGPLLYGEVGDTLLIIFKNQASRPYNIYPHGITDVRPLYSRRLPKGVKHLKDFPILPGEIFKYKWTVTVEDGPTKSDPRCLTRYYSSFVNMERDLASGLIGPLLICYKESVDQRGNQIMSDKRNVILFSVFDENRSWYLTENIQRFLPNPAGVQLEDPEFQASNIMHSINGYVFDSLQLSVCLHEVAYWYILSIGAQTDFLSVFFSGYTFKHKMVYEDTLTLFPFSGETVFMSMENPGLWILGCHNSDFRNRGMTALLKVSSCDKNTGDYYEDSYEDISAYLLSKNNAIEPRSFSQNGAPSPAGSPTSTEEGTSESATPESGPGSEPATSGSETPGTSESATPESGPGTSTEPSEGSAPGTSTEPSEGSAPGTSTEPSEGSAPGTSTEPSEGSAPGTSTEPSEGSAPGTSTEPSEGSAPGSPAGSPTSTEEGTSTEPSEGSAPGASSPPVLKRHQREITRTTLQSDQEEIDYDDTISVEMKKEDFDIYDEDENQSPRSFQKKTRHYFIAAVERLWDYGMSSSPHVLRNRAQSGSVPQFKKVVFQEFTDGSFTQPLYRGELNEHLGLLGPYIRAEVEDNIMVTFRNQASRPYSFYSSLISYEEDQRQGAEPRKNFVKPNETKTYFWKVQHHMAPTKDEFDCKAWAYFSDVDLEKDVHSGLIGPLLVCHTNTLNPAHGRQVTVQEFALFFTIFDETKSWYFTENMERNCRAPCNIQMEDPTFKENYRFHAINGYIMDTLPGLVMAQDQRIRWYLLSMGSNENIHSIHFSGHVFTVRKKEEYKMALYNLYPGVFETVEMLPSKAGIWRVECLIGEHLHAGMSTLFLVYSNKCQTPLGMASGHIRDFQITASGQYGQWAPKLARLHYSGSINAWSTKEPFSWIKVDLLAPMIIHGIKTQGARQKFSSLYISQFIIMYSLDGKKWQTYRGNSTGTLMVFFGNVDSSGIKHNIFNPPIIARYIRLHPTHYSIRSTLRMELMGCDLNSCSMPLGMESKAISDAQITASSYFTNMFATWSPSKARLHLQGRSNAWRPQVNNPKEWLQVDFQKTMKVTGVTTQGVKSLLTSMYVKEFLISSSQDGHQWTLFFQNGKVKVFQGNQDSFTPVVNSLDPPLLTRYLRIHPQSWVHQIALRMEVLGCEAQDLYGAPGTSESATPESGPGSEPATSGSETPGTSESATPESGPGSEPATSGSETPGTSESATPESGPGTSTEPSEGSAPGSPAGSPTSTEEGTSESATPESGPGSEPATSGSETPGTSESATPESGPGSPAGSPTSTEEGSPAGSPTSTEEGTSTEPSEGSAPGTSESATPESGPGTSESATPESGPGTSESATPESGPGSEPATSGSETPGSEPATSGSETPGSPAGSPTSTEEGTSTEPSEGSAPGTSTEPSEGSAPGSEPATSGSETPGTSESATPESGPGTSTEPSEGSAPASSEQKLISEEDLSPATGHHHHHH

SEQ ID NO: 1088 - DNA, 6162 bp, synthetic construct
  misc_feature 1..6162: note = Description of Artificial Sequence: Synthetic polynucleotide
  source 1..6162: mol_type = other DNA
gccaccagaagatactacctgggtgcagtggaactgtcatgggactatatgcaaagtgatctcggtgagctgcctgtgggcgcgccaacatcagagagcgccacccctgaaagtggtcccgggagcgagccagccacatctgggtcggaaacgccaggcacaagtgagtctgcaactcccgagtccggacctggctccgagcctgccactagcggctccgagactccgggaacttccgagagcgctacaccagaaagcggacccggaaccagtaccgaacctagcgagggctctgctccgggcagcccagccggctctcctacatccacggaggagggcacttccgaatccgccaccccggagtcagggccaggatctgaacccgctacctcaggcagtgagacgccaggaacgagcgagtccgctacaccggagagtgggccagggagccctgctggatctcctacgtccactgaggaagggtcaccagcgggctcgcccaccagcactgaagaaggtgcctcgagcgacgcaagatttcctcctagagtgccaaaatcttttccattcaacacctcagtcgtgtacaaaaagactctgtttgtagaattcacggatcaccttttcaacatcgctaagccaaggccaccctggatgggtctgctaggtcctaccatccaggctgaggtttatgatacagtggtcattacacttaagaacatggcttcccatcctgtcagtcttcatgctgttggtgtatcctactggaaagcttctgagggagctgaatatgatgatcagaccagtcaaagggagaaagaagatgataaagtcttccctggtggaagccatacatatgtctggcaggtcctgaaagagaatggtccaatggcctctgacccactgtgccttacctactcatatctttctcatgtggacctggtaaaagacttgaattcaggcctcattggagccctactagtatgtagagaagggagtctggccaaggaaaagacacagaccttgcacaaatttatactactttttgctgtatttgatgaagggaaaagttggcactcagaaacaaagaactccttgatgcaggatagggatgctgcatctgctcgggcctggcctaaaatgcacacagtcaatggttatgtaaacaggtctctgccaggtctgattggatgccacaggaaatcagtctattggcatgtgattggaatgggcaccactcctgaagtgcactcaatattcctcgaaggtcacacatttcttgtgaggaaccatcgccaggctagcttggaaatctcgccaataactttccttactgctcaaacactcttgatggaccttggacagtttctactgttttgtcatatctcttcccaccaacatgatggcatggaagcttatgtcaaagtagacagctgtccagaggaaccccaactacgaatgaaaaataatgaagaagcggaagactatgatgatgatcttactgattctgaaatggatgtggtcaggtttgatgatgacaactctccttcctttatccaaattcgctcagttgccaagaagcatcctaaaacttgggtacattacattgctgctgaagaggaggactgggactatgctcccttagtcctcgcccccgatgacagaagttataaaagtcaatatttgaacaatggccctcagcggattggtaggaagtacaaaaaagtccgatttatggcatacacagatgaaacctttaagactcgtgaagctattcagcatgaatcaggaatcttgggacctttactttatggggaagttggagacacactgttgattatatttaagaatcaagcaagcagaccatataacatctaccctcacggaatcactgatgtccgtcctttgtattcaaggagattaccaaaaggtgtaaaacatttgaaggattttccaattctgccaggagaaatattcaaatataaatggacagtgactgtagaagatgggccaactaaatcagatcctcggtgcctgacccgctattactctagtttcgttaatatggagagagatctagcttcaggactcattggccctctcctcatctgctacaaagaatctgtagatcaaagaggaaaccagataatgtcagacaagaggaatgtcatcctgttttctgtatttgatgagaaccgaagctggtacctcacagagaatatacaacgctttctccccaatccagctggagtgcagcttgaggatccagagttccaagcctccaacatcatgcacagcatcaatggctatgtttttgatagtttgcagttgtcagtttgtttgcatgaggtggcatactggtacattctaagcattggagcacagactgacttcctttctgtcttcttctctggatataccttcaaacacaaaatggtctatgaagacacactcaccctattcccattctcaggagaaactgtcttcatgtcgatggaaaacccaggtctatggattctggggtgccacaactcagactttcggaacagaggcatgaccgccttactgaaggtttctagttgtgacaagaacactggtgattattacgaggacagttatgaagatatttcagcatacttgctgagtaaaaacaatgccattgaaccaagaagcttctctcaaaacggcgcgccaagtcccgctggaagcccaactagcaccgaagaggggacctcagagtccgccacccccgagtccggccctggctctgagcctgccactagcggctccgagactcctggcacatccgaaagcgctacacccgagagtggacccggcacctctaccgagcccagtgagggctccgcccctggaacaagcaccgagcccagcgaaggcagcgccccagggacctccacagagcccagtgaaggcagtgctcctggcaccagcaccgaaccaagcgagggctctgcacccgggacctccaccgagccaagcgaaggctctgcccctggcacttccaccgagcccagcgaaggcagcgcccctgggagccccgctggctctcccaccagcactgaggagggcacatctaccgaaccaagtgaaggctctgcaccaggtgcctcgagcccaccagtcttgaaacgccatcaacgggaaataactcgtactactcttcagtcagatcaagaggaaatcgattatgatgataccatatcagttgaaatgaagaaggaagattttgacatttatgatgaggatgaaaatcagagcccccgcagctttcaaaagaaaacacgacactattttattgctgcagtggagaggctctgggattatgggatgagtagctccccacatgttctaagaaacagggctcagagtggcagtgtccctcagttcaagaaagttgttttccaggaatttactgatggctcctttactcagcccttataccgtggagaactaaatgaacatttgggactcctggggccatatataagagcagaagttgaagataatatcatggtaactttcagaaatcaggcctctcgtccctattccttctattctagccttatttcttatgaggaagatcagaggcaaggagcagaacctagaaaaaactttgtcaagcctaatgaaaccaaaacttacttttggaaagtgcaacatcatatggcacccactaaagatgagtttgactgcaaagcctgggcttatttctctgatgttgacctggaaaaagatgtgcactcaggcctgattggaccccttctggtctgccacactaacacactgaaccctgctcatgggagacaagtgacagtacaggaatttgctctgtttttcaccatctttgatgagaccaaaagctggtacttcactgaaaatatggaaagaaactgcagggctccctgcaatatccagatggaagatcccacttttaaagagaattatcgcttccatgcaatcaatggctacataatggatacactacctggcttagtaatggctcaggatcaaaggattcgatggtatctgctcagcatgggcagcaatgaaaacatccattctattcatttcagtggacatgtgttcactgtacgaaaaaaagaggagtataaaatggcactgtacaatctctatccaggtgtttttgagacagtggaaatgttaccatccaaagctggaatttggcgggtggaatgccttattggcgagcatctacatgctgggatgagcacactttttctggtgtacagcaataagtgtcagactcccctgggaatggcttctggacacattagagattttcagattacagcttcaggacaatatggacagtgggccccaaagctggccagacttcattattccggatcaatcaatgcctggagcaccaaggagcccttttcttggatcaaggtggatctgttggcaccaatgattattcacggcatcaagacccagggtgcccgtcagaagttctccagcctctacatctctcagtttatcatcatgtatagtcttgatgggaagaagtggcagacttatcgaggaaattccactggaaccttaatggtcttctttggcaatgtggattcatctgggataaaacacaatatttttaaccctccaattattgctcgatacatccgtttgcacccaactcattatagcattcgcagcactcttcgcatggagttgatgggctgtgatttaaatagttgcagcatgccattgggaatggagagtaaagcaatatcagatgcacagattactgcttcatcctactttaccaatatgtttgccacctggtctccttcaaaagctcgacttcacctccaagggaggagtaatgcctggagacctcaggtgaataatccaaaagagtggctgcaagtggacttccagaagacaatgaaagtcacaggagtaactactcagggagtaaaatctctgcttaccagcatgtatgtgaaggagttcctcatctccagcagtcaagatggccatcagtggactctcttttttcagaatggcaaagtaaaggtttttcagggaaatcaagactccttcacacctgtggtgaactctctagacccaccgttactgactcgctaccttcgaattcacccccagagttgggtgcaccagattgccctgaggatggaggttctgggctgcgaggcacaggacctctacggcgcgccaggtacctcagagtctgctacccccgagtcagggccaggatcagagccagccacctccgggtctgagacacccgggacttccgagagtgccacccctgagtccggacccgggtccgagcccgccacttccggctccgaaactcccggcacaagcgagagcgctaccccagagtcaggaccaggaacatctacagagccctctgaaggctccgctccagggtccccagccggcagtcccactagcaccgaggagggaacctctgaaagcgccacacccgaatcagggccagggtctgagcctgctaccagcggcagcgagacaccaggcacctctgagtccgccacaccagagtccggacccggatctcccgctgggagccccacctccactgaggagggatctcctgctggctctccaacatctactgaggaaggtacctcaaccgagccatccgagggatcagctcccggcacctcagagtcggcaaccccggagtctggacccggaacttccgaaagtgccacaccagagtccggtcccgggacttcagaatcagcaacacccgagtccggccctgggtctgaacccgccacaagtggtagtgagacaccaggatcagaacctgctacctcagggtcagagacacccggatctccggcaggctcaccaacctccactgaggagggcaccagcacagaaccaagcgagggctccgcacccggaacaagcactgaacccagtgagggttcagcacccggctctgagccggccacaagtggcagtgagacacccggcacttcagagagtgccacccccgagagtggcccaggcactagtaccgagccctctgaaggcagtgcgccagcctcgagcgaacaaaaactcatctcagaagaggatctgtcacctgcaaccggtcatcatcaccatcaccattga

SEQ ID NO: 1089 - protein, 2053 aa, synthetic construct
  REGION 1..2053: note = Description of Artificial Sequence: Synthetic polypeptide
ATRRYYLGAVELSWDYMQSDLGELPVDARFPPRVPKSFPFGAPTSESATPESGPGSEPATSGSETPGTSESATPESGPGSEPATSGSETPGTSESATPESGPGTSTEPSEGSAPGSPAGSPTSTEEGTSESATPESGPGSEPATSGSETPGTSESATPESGPGSPAGSPTSTEEGSPAGSPTSTEEGASSNTSVVYKKTLFVEFTDHLFNIAKPRPPWMGLLGPTIQAEVYDTVVITLKNMASHPVSLHAVGVSYWKASEGAEYDDQTSQREKEDDKVFPGGSHTYVWQVLKENGPMASDPLCLTYSYLSHVDLVKDLNSGLIGALLVCREGSLAKEKTQTLHKFILLFAVFDEGKSWHSETKNSLMQDRDAASARAWPKMHTVNGYVNRSLPGLIGCHRKSVYWHVIGMGTTPEVHSIFLEGHTFLVRNHRQASLEISPITFLTAQTLLMDLGQFLLFCHISSHQHDGMEAYVKVDSCPEEPQLRMKNNEEAEDYDDDLTDSEMDVVRFDDDNSPSFIQIRSVAKKHPKTWVHYIAAEEEDWDYAPLVLAPDDRSYKSQYLNNGPQRIGRKYKKVRFMAYTDETFKTREAIQHESGILGPLLYGEVGDTLLIIFKNQASRPYNIYPHGITDVRPLYSRRLPKGVKHLKDFPILPGEIFKYKWTVTVEDGPTKSDPRCLTRYYSSFVNMERDLASGLIGPLLICYKESVDQRGNQIMSDKRNVILFSVFDENRSWYLTENIQRFLPNPAGVQLEDPEFQASNIMHSINGYVFDSLQLSVCLHEVAYWYILSIGAQTDFLSVFFSGYTFKHKMVYEDTLTLFPFSGETVFMSMENPGLWILGCHNSDFRNRGMTALLKVSSCDKNTGDYYEDSYEDISAYLLSKNNAIEPRSFSQNGAPSPAGSPTSTEEGTSESATPESGPGSEPATSGSETPGTSESATPESGPGTSTEPSEGSAPGTSTEPSEGSAPGTSTEPSEGSAPGTSTEPSEGSAPGTSTEPSEGSAPGTSTEPSEGSAPGSPAGSPTSTEEGTSTEPSEGSAPGASSPPVLKRHQREITRTTLQSDQEEIDYDDTISVEMKKEDFDIYDEDENQSPRSFQKKTRHYFIAAVERLWDYGMSSSPHVLRNRAQSGSVPQFKKVVFQEFTDGSFTQPLYRGELNEHLGLLGPYIRAEVEDNIMVTFRNQASRPYSFYSSLISYEEDQRQGAEPRKNFVKPNETKTYFWKVQHHMAPTKDEFDCKAWAYFSDVDLEKDVHSGLIGPLLVCHTNTLNPAHGRQVTVQEFALFFTIFDETKSWYFTENMERNCRAPCNIQMEDPTFKENYRFHAINGYIMDTLPGLVMAQDQRIRWYLLSMGSNENIHSIHFSGHVFTVRKKEEYKMALYNLYPGVFETVEMLPSKAGIWRVECLIGEHLHAGMSTLFLVYSNKCQTPLGMASGHIRDFQITASGQYGQWAPKLARLHYSGSINAWSTKEPFSWIKVDLLAPMIIHGIKTQGARQKFSSLYISQFIIMYSLDGKKWQTYRGNSTGTLMVFFGNVDSSGIKHNIFNPPIIARYIRLHPTHYSIRSTLRMELMGCDLNSCSMPLGMESKAISDAQITASSYFTNMFATWSPSKARLHLQGRSNAWRPQVNNPKEWLQVDFQKTMKVTGVTTQGVKSLLTSMYVKEFLISSSQDGHQWTLFFQNGKVKVFQGNQDSFTPVVNSLDPPLLTRYLRIHPQSWVHQIALRMEVLGCEAQDLYGAPGTSESATPESGPGSEPATSGSETPGTSESATPESGPGSEPATSGSETPGTSESATPESGPGTSTEPSEGSAPGSPAGSPTSTEEGTSESATPESGPGSEPATSGSETPGTSESATPESGPGSPAGSPTSTEEGSPAGSPTSTEEGTSTEPSEGSAPGTSESATPESGPGTSESATPESGPGTSESATPESGPGSEPATSGSETPGSEPATSGSETPGSPAGSPTSTEEGTSTEPSEGSAPGTSTEPSEGSAPGSEPATSGSETPGTSESATPESGPGTSTEPSEGSAPASSEQKLISEEDLSPATGHHHHHH

SEQ ID NO: 1090 - DNA, 6162 bp, synthetic construct
  misc_feature 1..6162: note = Description of Artificial Sequence: Synthetic polynucleotide
  source 1..6162: mol_type = other DNA
gccaccagaagatactacctgggtgcagtggaactgtcatgggactatatgcaaagtgatctcggtgagctgcctgtggacgcaagatttcctcctagagtgccaaaatcttttccattcggcgcgccaacatcagagagcgccacccctgaaagtggtcccgggagcgagccagccacatctgggtcggaaacgccaggcacaagtgagtctgcaactcccgagtccggacctggctccgagcctgccactagcggctccgagactccgggaacttccgagagcgctacaccagaaagcggacccggaaccagtaccgaacctagcgagggctctgctccgggcagcccagccggctctcctacatccacggaggagggcacttccgaatccgccaccccggagtcagggccaggatctgaacccgctacctcaggcagtgagacgccaggaacgagcgagtccgctacaccggagagtgggccagggagccctgctggatctcctacgtccactgaggaagggtcaccagcgggctcgcccaccagcactgaagaaggtgcctcgagcaacacctcagtcgtgtacaaaaagactctgtttgtagaattcacggatcaccttttcaacatcgctaagccaaggccaccctggatgggtctgctaggtcctaccatccaggctgaggtttatgatacagtggtcattacacttaagaacatggcttcccatcctgtcagtcttcatgctgttggtgtatcctactggaaagcttctgagggagctgaatatgatgatcagaccagtcaaagggagaaagaagatgataaagtcttccctggtggaagccatacatatgtctggcaggtcctgaaagagaatggtccaatggcctctgacccactgtgccttacctactcatatctttctcatgtggacctggtaaaagacttgaattcaggcctcattggagccctactagtatgtagagaagggagtctggccaaggaaaagacacagaccttgcacaaatttatactactttttgctgtatttgatgaagggaaaagttggcactcagaaacaaagaactccttgatgcaggatagggatgctgcatctgctcgggcctggcctaaaatgcacacagtcaatggttatgtaaacaggtctctgccaggtctgattggatgccacaggaaatcagtctattggcatgtgattggaatgggcaccactcctgaagtgcactcaatattcctcgaaggtcacacatttcttgtgaggaaccatcgccaggctagcttggaaatctcgccaataactttccttactgctcaaacactcttgatggaccttggacagtttctactgttttgtcatatctcttcccaccaacatgatggcatggaagcttatgtcaaagtagacagctgtccagaggaaccccaactacgaatgaaaaataatgaagaagcggaagactatgatgatgatcttactgattctgaaatggatgtggtcaggtttgatgatgacaactctccttcctttatccaaattcgctcagttgccaagaagcatcctaaaacttgggtacattacattgctgctgaagaggaggactgggactatgctcccttagtcctcgcccccgatgacagaagttataaaagtcaatatttgaacaatggccctcagcggattggtaggaagtacaaaaaagtccgatttatggcatacacagatgaaacctttaagactcgtgaagctattcagcatgaatcaggaatcttgggacctttactttatggggaagttggagacacactgttgattatatttaagaatcaagcaagcagaccatataacatctaccctcacggaatcactgatgtccgtcctttgtattcaaggagattaccaaaaggtgtaaaacatttgaaggattttccaattctgccaggagaaatattcaaatataaatggacagtgactgtagaagatgggccaactaaatcagatcctcggtgcctgacccgctattactctagtttcgttaatatggagagagatctagcttcaggactcattggccctctcctcatctgctacaaagaatctgtagatcaaagaggaaaccagataatgtcagacaagaggaatgtcatcctgttttctgtatttgatgagaaccgaagctggtacctcacagagaatatacaacgctttctccccaatccagctggagtgcagcttgaggatccagagttccaagcctccaacatcatgcacagcatcaatggctatgtttttgatagtttgcagttgtcagtttgtttgcatgaggtggcatactggtacattctaagcattggagcacagactgacttcctttctgtcttcttctctggatataccttcaaacacaaaatggtctatgaagacacactcaccctattcccattctcaggagaaactgtcttcatgtcgatggaaaacccaggtctatggattctggggtgccacaactcagactttcggaacagaggcatgaccgccttactgaaggtttctagttgtgacaagaacactggtgattattacgaggacagttatgaagatatttcagcatacttgctgagtaaaaacaatgccattgaaccaagaagcttctctcaaaacggcgcgccaagtcccgctggaagcccaactagcaccgaagaggggacctcagagtccgccacccccgagtccggccctggctctgagcctgccactagcggctccgagactcctggcacatccgaaagcgctacacccgagagtggacccggcacctctaccgagcccagtgagggctccgcccctggaacaagcaccgagcccagcgaaggcagcgccccagggacctccacagagcccagtgaaggcagtgctcctggcaccagcaccgaaccaagcgagggctctgcacccgggacctccaccgagccaagcgaaggctctgcccctggcacttccaccgagcccagcgaaggcagcgcccctgggagccccgctggctctcccaccagcactgaggagggcacatctaccgaaccaagtgaaggctctgcaccaggtgcctcgagcccaccagtcttgaaacgccatcaacgggaaataactcgtactactcttcagtcagatcaagaggaaatcgattatgatgataccatatcagttgaaatgaagaaggaagattttgacatttatgatgaggatgaaaatcagagcccccgcagctttcaaaagaaaacacgacactattttattgctgcagtggagaggctctgggattatgggatgagtagctccccacatgttctaagaaacagggctcagagtggcagtgtccctcagttcaagaaagttgttttccaggaatttactgatggctcctttactcagcccttataccgtggagaactaaatgaacatttgggactcctggggccatatataagagcagaagttgaagataatatcatggtaactttcagaaatcaggcctctcgtccctattccttctattctagccttatttcttatgaggaagatcagaggcaaggagcagaacctagaaaaaactttgtcaagcctaatgaaaccaaaacttacttttggaaagtgcaacatcatatggcacccactaaagatgagtttgactgcaaagcctgggcttatttctctgatgttgacctggaaaaagatgtgcactcaggcctgattggaccccttctggtctgccacactaacacactgaaccctgctcatgggagacaagtgacagtacaggaatttgctctgtttttcaccatctttgatgagaccaaaagctggtacttcactgaaaatatggaaagaaactgcagggctccctgcaatatccagatggaagatcccacttttaaagagaattatcgcttccatgcaatcaatggctacataatggatacactacctggcttagtaatggctcaggatcaaaggattcgatggtatctgctcagcatgggcagcaatgaaaacatccattctattcatttcagtggacatgtgttcactgtacgaaaaaaagaggagtataaaatggcactgtacaatctctatccaggtgtttttgagacagtggaaatgttaccatccaaagctggaatttggcgggtggaatgccttattggcgagcatctacatgctgggatgagcacactttttctggtgtacagcaataagtgtcagactcccctgggaatggcttctggacacattagagattttcagattacagcttcaggacaatatggacagtgggccccaaagctggccagacttcattattccggatcaatcaatgcctggagcaccaaggagcccttttcttggatcaaggtggatctgttggcaccaatgattattcacggcatcaagacccagggtgcccgtcagaagttctccagcctctacatctctcagtttatcatcatgtatagtcttgatgggaagaagtggcagacttatcgaggaaattccactggaaccttaatggtcttctttggcaatgtggattcatctgggataaaacacaatatttttaaccctccaattattgctcgatacatccgtttgcacccaactcattatagcattcgcagcactcttcgcatggagttgatgggctgtgatttaaatagttgcagcatgccattgggaatggagagtaaagcaatatcagatgcacagattactgcttcatcctactttaccaatatgtttgccacctggtctccttcaaaagctcgacttcacctccaagggaggagtaatgcctggagacctcaggtgaataatccaaaagagtggctgcaagtggacttccagaagacaatgaaagtcacaggagtaactactcagggagtaaaatctctgcttaccagcatgtatgtgaaggagttcctcatctccagcagtcaagatggccatcagtggactctcttttttcagaatggcaaagtaaaggtttttcagggaaatcaagactccttcacacctgtggtgaactctctagacccaccgttactgactcgctaccttcgaattcacccccagagttgggtgcaccagattgccctgaggatggaggttctgggctgcgaggcacaggacctctacggcgcgccaggtacctcagagtctgctacccccgagtcagggccaggatcagagccagccacctccgggtctgagacacccgggacttccgagagtgccacccctgagtccggacccgggtccgagcccgccacttccggctccgaaactcccggcacaagcgagagcgctaccccagagtcaggaccaggaacatctacagagccctctgaaggctccgctccagggtccccagccggcagtcccactagcaccgaggagggaacctctgaaagcgccacacccgaatcagggccagggtctgagcctgctaccagcggcagcgagacaccaggcacctctgagtccgccacaccagagtccggacccggatctcccgctgggagccccacctccactgaggagggatctcctgctggctctccaacatctactgaggaaggtacctcaaccgagccatccgagggatcagctcccggcacctcagagtcggcaaccccggagtctggacccggaacttccgaaagtgccacaccagagtccggtcccgggacttcagaatcagcaacacccgagtccggccctgggtctgaacccgccacaagtggtagtgagacaccaggatcagaacctgctacctcagggtcagagacacccggatctccggcaggctcaccaacctccactgaggagggcaccagcacagaaccaagcgagggctccgcacccggaacaagcactgaacccagtgagggttcagcacccggctctgagccggccacaagtggcagtgagacacccggcacttcagagagtgccacccccgagagtggcccaggcactagtaccgagccctctgaaggcagtgcgccagcctcgagcgaacaaaaactcatctcagaagaggatctgtcacctgcaaccggtcatcatcaccatcaccattga

SEQ ID NO: 1091 - protein, 2053 aa, synthetic construct
  REGION 1..2053: note = Description of Artificial Sequence: Synthetic polypeptide
ATRRYYLGAVELSWDYMQSDLGELPVDARFPPRVPKSFPFNTSVVYKKTLFVEFTDHLFNIAKPRPPWMGLLGPTIQAEVYDTVVITLKNMASHPVSLHAVGVSYWKASEGAEYDDQTSQREKEDDKVFPGGSHTYVWQVLKENGPMASDPLCLTYSYLSHVDLVKDLNSGLIGALLVCREGSLAKEKTQTLHKFILLFAVFDEGKSWHSETKNSLMQDRDAASARAWPKMHTVNGYVNRSLPGLIGCHRKSVYWHVIGMGTTPEVHSIFLEGHTFLVRNHRQASLEISPITFLTAQTLLMDLGQFLLFCHISSHQHDGMEAYVKVDSCPEEPQLRMKNNEEAEDYDDDLTDSEMDVVRFDDDNSPSFIQIRSVAKKHPKTWVHYIAAEEEDWDYAPLVLAPDGAPGASPGTSSTGSPGSSPSASTGTGPGSSPSASTGTGPGTPGSGTASSSPGSSTPSGATGSPGSSPSASTGTGPGASPGTSSTGSPGTPGSGTASSSPGSSTPSGATGSPGTPGSGTASSSPGASPGTSSTGSPGASPGTSSTGSPASSDRSYKSQYLNNGPQRIGRKYKKVRFMAYTDETFKTREAIQHESGILGPLLYGEVGDTLLIIFKNQASRPYNIYPHGITDVRPLYSRRLPKGVKHLKDFPILPGEIFKYKWTVTVEDGPTKSDPRCLTRYYSSFVNMERDLASGLIGPLLICYKESVDQRGNQIMSDKRNVILFSVFDENRSWYLTENIQRFLPNPAGVQLEDPEFQASNIMHSINGYVFDSLQLSVCLHEVAYWYILSIGAQTDFLSVFFSGYTFKHKMVYEDTLTLFPFSGETVFMSMENPGLWILGCHNSDFRNRGMTALLKVSSCDKNTGDYYEDSYEDISAYLLSKNNAIEPRSFSQNGAPSPAGSPTSTEEGTSESATPESGPGSEPATSGSETPGTSESATPESGPGTSTEPSEGSAPGTSTEPSEGSAPGTSTEPSEGSAPGTSTEPSEGSAPGTSTEPSEGSAPGTSTEPSEGSAPGSPAGSPTSTEEGTSTEPSEGSAPGASSPPVLKRHQAEITRTTLQSDQEEIDYDDTISVEMKKEDFDIYDEDENQSPRSFQKKTRHYFIAAVERLWDYGMSSSPHVLRNRAQSGSVPQFKKVVFQEFTDGSFTQPLYRGELNEHLGLLGPYIRAEVEDNIMVTFRNQASRPYSFYSSLISYEEDQRQGAEPRKNFVKPNETKTYFWKVQHHMAPTKDEFDCKAWAYFSDVDLEKDVHSGLIGPLLVCHTNTLNPAHGRQVTVQEFALFFTIFDETKSWYFTENMERNCRAPCNIQMEDPTFKENYRFHAINGYIMDTLPGLVMAQDQRIRWYLLSMGSNENIHSIHFSGHVFTVRKKEEYKMALYNLYPGVFETVEMLPSKAGIWRVECLIGEHLHAGMSTLFLVYSNKCQTPLGMASGHIRDFQITASGQYGQWAPKLARLHYSGSINAWSTKEPFSWIKVDLLAPMIIHGIKTQGARQKFSSLYISQFIIMYSLDGKKWQTYRGNSTGTLMVFFGNVDSSGIKHNIFNPPIIARYIRLHPTHYSIRSTLRMELMGCDLNSCSMPLGMESKAISDAQITASSYFTNMFATWSPSKARLHLQGRSNAWRPQVNNPKEWLQVDFQKTMKVTGVTTQGVKSLLTSMYVKEFLISSSQDGHQWTLFFQNGKVKVFQGNQDSFTPVVNSLDPPLLTRYLRIHPQSWVHQIALRMEVLGCEAQDLYGAPGTSESATPESGPGSEPATSGSETPGTSESATPESGPGSEPATSGSETPGTSESATPESGPGTSTEPSEGSAPGSPAGSPTSTEEGTSESATPESGPGSEPATSGSETPGTSESATPESGPGSPAGSPTSTEEGSPAGSPTSTEEGTSTEPSEGSAPGTSESATPESGPGTSESATPESGPGTSESATPESGPGSEPATSGSETPGSEPATSGSETPGSPAGSPTSTEEGTSTEPSEGSAPGTSTEPSEGSAPGSEPATSGSETPGTSESATPESGPGTSTEPSEGSAPASSEQKLISEEDLSPATGHHHHHH

SEQ ID NO: 1092 - DNA, 6162 bp, synthetic construct
  misc_feature 1..6162: note = Description of Artificial Sequence: Synthetic polynucleotide
  source 1..6162: mol_type = other DNA
gccaccagaagatactacctgggtgcagtggaactgtcatgggactatatgcaaagtgatctcggtgagctgcctgtggacgcaagatttcctcctagagtgccaaaatcttttccattcaacacctcagtcgtgtacaaaaagactctgtttgtagaattcacggatcaccttttcaacatcgctaagccaaggccaccctggatgggtctgctaggtcctaccatccaggctgaggtttatgatacagtggtcattacacttaagaacatggcttcccatcctgtcagtcttcatgctgttggtgtatcctactggaaagcttctgagggagctgaatatgatgatcagaccagtcaaagggagaaagaagatgataaagtcttccctggtggaagccatacatatgtctggcaggtcctgaaagagaatggtccaatggcctctgacccactgtgccttacctactcatatctttctcatgtggacctggtaaaagacttgaattcaggcctcattggagccctactagtatgtagagaagggagtctggccaaggaaaagacacagaccttgcacaaatttatactactttttgctgtatttgatgaagggaaaagttggcactcagaaacaaagaactccttgatgcaggatagggatgctgcatctgctcgggcctggcctaaaatgcacacagtcaatggttatgtaaacaggtctctgccaggtctgattggatgccacaggaaatcagtctattggcatgtgattggaatgggcaccactcctgaagtgcactcaatattcctcgaaggtcacacatttcttgtgaggaaccatcgccaggctagcttggaaatctcgccaataactttccttactgctcaaacactcttgatggaccttggacagtttctactgttttgtcatatctcttcccaccaacatgatggcatggaagcttatgtcaaagtagacagctgtccagaggaaccccaactacgaatgaaaaataatgaagaagcggaagactatgatgatgatcttactgattctgaaatggatgtggtcaggtttgatgatgacaactctccttcctttatccaaattcgctcagttgccaagaagcatcctaaaacttgggtacattacattgctgctgaagaggaggactgggactatgctcccttagtcctcgcccccgatggcgcgccaggtgcctcgccgggaacatcatcaactggttcacccgggtcatccccctcggcctcaaccgggacgggtcccggctcatcccccagcgccagcactggaacaggtcctggcactcctggttccggtacggcatcgtcatccccgggaagctcaacaccgtccggagcgacaggatcacctggctcgtcaccttcggcgtcaactggaacggggccaggggcctcacccggaacgtcctcgactgggtcgcctggtacgccgggatcaggaacggcctcatcctcgcctgggtcctcaacgccctcgggtgcgactggttcgccgggaactcctggctcggggacggcctcgtcgtcgcctggggcatcaccggggacgagctccacggggtcccctggagcgtcaccggggacctcctcgacaggtagcccggcctcgagcgacagaagttataaaagtcaatatttgaacaatggccctcagcggattggtaggaagtacaaaaaagtccgatttatggcatacacagatgaaacctttaagactcgtgaagctattcagcatgaatcaggaatcttgggacctttactttatggggaagttggagacacactgttgattatatttaagaatcaagcaagcagaccatataacatctaccctcacggaatcactgatgtccgtcctttgtattcaaggagattaccaaaaggtgtaaaacatttgaaggattttccaattctgccaggagaaatattcaaatataaatggacagtgactgtagaagatgggccaactaaatcagatcctcggtgcctgacccgctattactctagtttcgttaatatggagagagatctagcttcaggactcattggccctctcctcatctgctacaaagaatctgtagatcaaagaggaaaccagataatgtcagacaagaggaatgtcatcctgttttctgtatttgatgagaaccgaagctggtacctcacagagaatatacaacgctttctccccaatccagctggagtgcagcttgaggatccagagttccaagcctccaacatcatgcacagcatcaatggctatgtttttgatagtttgcagttgtcagtttgtttgcatgaggtggcatactggtacattctaagcattggagcacagactgacttcctttctgtcttcttctctggatataccttcaaacacaaaatggtctatgaagacacactcaccctattcccattctcaggagaaactgtcttcatgtcgatggaaaacccaggtctatggattctggggtgccacaactcagactttcggaacagaggcatgaccgccttactgaaggtttctagttgtgacaagaacactggtgattattacgaggacagttatgaagatatttcagcatacttgctgagtaaaaacaatgccattgaaccaagaagcttctctcaaaacggcgcgccaagtcccgctggaagcccaactagcaccgaagaggggacctcagagtccgccacccccgagtccggccctggctctgagcctgccactagcggctccgagactcctggcacatccgaaagcgctacacccgagagtggacccggcacctctaccgagcccagtgagggctccgcccctggaacaagcaccgagcccagcgaaggcagcgccccagggacctccacagagcccagtgaaggcagtgctcctggcaccagcaccgaaccaagcgagggctctgcacccgggacctccaccgagccaagcgaaggctctgcccctggcacttccaccgagcccagcgaaggcagcgcccctgggagccccgctggctctcccaccagcactgaggagggcacatctaccgaaccaagtgaaggctctgcaccaggtgcctcgagcccaccagtcttgaaacgccatcaagctgaaataactcgtactactcttcagtcagatcaagaggaaatcgattatgatgataccatatcagttgaaatgaagaaggaagattttgacatttatgatgaggatgaaaatcagagcccccgcagctttcaaaagaaaacacgacactattttattgctgcagtggagaggctctgggattatgggatgagtagctccccacatgttctaagaaacagggctcagagtggcagtgtccctcagttcaagaaagttgttttccaggaatttactgatggctcctttactcagcccttataccgtggagaactaaatgaacatttgggactcctggggccatatataagagcagaagttgaagataatatcatggtaactttcagaaatcaggcctctcgtccctattccttctattctagccttatttcttatgaggaagatcagaggcaaggagcagaacctagaaaaaactttgtcaagcctaatgaaaccaaaacttacttttggaaagtgcaacatcatatggcacccactaaagatgagtttgactgcaaagcctgggcttatttctctgatgttgacctggaaaaagatgtgcactcaggcctgattggaccccttctggtctgccacactaacacactgaaccctgctcatgggagacaagtgacagtacaggaatttgctctgtttttcaccatctttgatgagaccaaaagctggtacttcactgaaaatatggaaagaaactgcagggctccctgcaatatccagatggaagatcccacttttaaagagaattatcgcttccatgcaatcaatggctacataatggatacactacctggcttagtaatggctcaggatcaaaggattcgatggtatctgctcagcatgggcagcaatgaaaacatccattctattcatttcagtggacatgtgttcactgtacgaaaaaaagaggagtataaaatggcactgtacaatctctatccaggtgtttttgagacagtggaaatgttaccatccaaagctggaatttggcgggtggaatgccttattggcgagcatctacatgctgggatgagcacactttttctggtgtacagcaataagtgtcagactcccctgggaatggcttctggacacattagagattttcagattacagcttcaggacaatatggacagtgggccccaaagctggccagacttcattattccggatcaatcaatgcctggagcaccaaggagcccttttcttggatcaaggtggatctgttggcaccaatgattattcacggcatcaagacccagggtgcccgtcagaagttctccagcctctacatctctcagtttatcatcatgtatagtcttgatgggaagaagtggcagacttatcgaggaaattccactggaaccttaatggtcttctttggcaatgtggattcatctgggataaaacacaatatttttaaccctccaattattgctcgatacatccgtttgcacccaactcattatagcattcgcagcactcttcgcatggagttgatgggctgtgatttaaatagttgcagcatgccattgggaatggagagtaaagcaatatcagatgcacagattactgcttcatcctactttaccaatatgtttgccacctggtctccttcaaaagctcgacttcacctccaagggaggagtaatgcctggagacctcaggtgaataatccaaaagagtggctgcaagtggacttccagaagacaatgaaagtcacaggagtaactactcagggagtaaaatctctgcttaccagcatgtatgtgaaggagttcctcatctccagcagtcaagatggccatcagtggactctcttttttcagaatggcaaagtaaaggtttttcagggaaatcaagactccttcacacctgtggtgaactctctagacccaccgttactgactcgctaccttcgaattcacccccagagttgggtgcaccagattgccctgaggatggaggttctgggctgcgaggcacaggacctctacggcgcgccaggtacctcagagtctgctacccccgagtcagggccaggatcagagccagccacctccgggtctgagacacccgggacttccgagagtgccacccctgagtccggacccgggtccgagcccgccacttccggctccgaaactcccggcacaagcgagagcgctaccccagagtcaggaccaggaacatctacagagccctctgaaggctccgctccagggtccccagccggcagtcccactagcaccgaggagggaacctctgaaagcgccacacccgaatcagggccagggtctgagcctgctaccagcggcagcgagacaccaggcacctctgagtccgccacaccagagtccggacccggatctcccgctgggagccccacctccactgaggagggatctcctgctggctctccaacatctactgaggaaggtacctcaaccgagccatccgagggatcagctcccggcacctcagagtcggcaaccccggagtctggacccggaacttccgaaagtgccacaccagagtccggtcccgggacttcagaatcagcaacacccgagtccggccctgggtctgaacccgccacaagtggtagtgagacaccaggatcagaacctgctacctcagggtcagagacacccggatctccggcaggctcaccaacctccactgaggagggcaccagcacagaaccaagcgagggctccgcacccggaacaagcactgaacccagtgagggttcagcacccggctctgagccggccacaagtggcagtgagacacccggcacttcagagagtgccacccccgagagtggcccaggcactagtaccgagccctctgaaggcagtgcgccagcctcgagcgaacaaaaactcatctcagaagaggatctgtcacctgcaaccggtcatcatcaccatcaccattga

SEQ ID NO: 1093 - protein, 2053 aa, synthetic construct
  REGION 1..2053: note = Description of Artificial Sequence: Synthetic polypeptide
ATRRYYLGAVELSWDYMQSDLGELPVDARFPPRVPKSFPFNTSVVYKKTLFVEFTDHLFNIAKPRPPWMGLLGPTIQAEVYDTVVITLKNMASHPVSLHAVGVSYWKASEGAEYDDQTSQREKEDDKVFPGGSHTYVWQVLKENGPMASDPLCLTYSYLSHVDLVKDLNSGLIGALLVCREGSLAKEKTQTLHKFILLFAVFDEGKSWHSETKNSLMQDRDAASARAWPKMHTVNGYVNRSLPGLIGCHRKSVYWHVIGMGTTPEVHSIFLEGHTFLVRNHRQASLEISPITFLTAQTLLMDLGQFLLFCHISSHQHDGMEAYVKVDSCPEEPQLRMKNNEEAEDYDDDLTDSEMDVVRFDDDNSPSFIQIRSVAKKHPKTWVHYIAAEEEDWDYAPLVGAPTSTEPSEGSAPGSPAGSPTSTEEGTSTEPSEGSAPGTSTEPSEGSAPGTSESATPESGPGTSTEPSEGSAPGTSESATPESGPGSEPATSGSETPGTSTEPSEGSAPGTSTEPSEGSAPGTSESATPESGPGTSESATPESGPGASSLAPDDRSYKSQYLNNGPQRIGRKYKKVRFMAYTDETFKTREAIQHESGILGPLLYGEVGDTLLIIFKNQASRPYNIYPHGITDVRPLYSRRLPKGVKHLKDFPILPGEIFKYKWTVTVEDGPTKSDPRCLTRYYSSFVNMERDLASGLIGPLLICYKESVDQRGNQIMSDKRNVILFSVFDENRSWYLTENIQRFLPNPAGVQLEDPEFQASNIMHSINGYVFDSLQLSVCLHEVAYWYILSIGAQTDFLSVFFSGYTFKHKMVYEDTLTLFPFSGETVFMSMENPGLWILGCHNSDFRNRGMTALLKVSSCDKNTGDYYEDSYEDISAYLLSKNNAIEPRSFSQNGAPSPAGSPTSTEEGTSESATPESGPGSEPATSGSETPGTSESATPESGPGTSTEPSEGSAPGTSTEPSEGSAPGTSTEPSEGSAPGTSTEPSEGSAPGTSTEPSEGSAPGTSTEPSEGSAPGSPAGSPTSTEEGTSTEPSEGSAPGASSPPVLKRHQAEITRTTLQSDQEEIDYDDTISVEMKKEDFDIYDEDENQSPRSFQKKTRHYFIAAVERLWDYGMSSSPHVLRNRAQSGSVPQFKKVVFQEFTDGSFTQPLYRGELNEHLGLLGPYIRAEVEDNIMVTFRNQASRPYSFYSSLISYEEDQRQGAEPRKNFVKPNETKTYFWKVQHHMAPTKDEFDCKAWAYFSDVDLEKDVHSGLIGPLLVCHTNTLNPAHGRQVTVQEFALFFTIFDETKSWYFTENMERNCRAPCNIQMEDPTFKENYRFHAINGYIMDTLPGLVMAQDQRIRWYLLSMGSNENIHSIHFSGHVFTVRKKEEYKMALYNLYPGVFETVEMLPSKAGIWRVECLIGEHLHAGMSTLFLVYSNKCQTPLGMASGHIRDFQITASGQYGQWAPKLARLHYSGSINAWSTKEPFSWIKVDLLAPMIIHGIKTQGARQKFSSLYISQFIIMYSLDGKKWQTYRGNSTGTLMVFFGNVDSSGIKHNIFNPPIIARYIRLHPTHYSIRSTLRMELMGCDLNSCSMPLGMESKAISDAQITASSYFTNMFATWSPSKARLHLQGRSNAWRPQVNNPKEWLQVDFQKTMKVTGVTTQGVKSLLTSMYVKEFLISSSQDGHQWTLFFQNGKVKVFQGNQDSFTPVVNSLDPPLLTRYLRIHPQSWVHQIALRMEVLGCEAQDLYGAPGTSESATPESGPGSEPATSGSETPGTSESATPESGPGSEPATSGSETPGTSESATPESGPGTSTEPSEGSAPGSPAGSPTSTEEGTSESATPESGPGSEPATSGSETPGTSESATPESGPGSPAGSPTSTEEGSPAGSPTSTEEGTSTEPSEGSAPGTSESATPESGPGTSESATPESGPGTSESATPESGPGSEPATSGSETPGSEPATSGSETPGSPAGSPTSTEEGTSTEPSEGSAPGTSTEPSEGSAPGSEPATSGSETPGTSESATPESGPGTSTEPSEGSAPASSEQKLISEEDLSPATGHHHHHH

SEQ ID NO: 1094 - DNA, 6162 bp, synthetic construct
  misc_feature 1..6162: note = Description of Artificial Sequence: Synthetic polynucleotide
  source 1..6162: mol_type = other DNA
gccaccagaagatactacctgggtgcagtggaactgtcatgggactatatgcaaagtgatctcggtgagctgcctgtggacgcaagatttcctcctagagtgccaaaatcttttccattcaacacctcagtcgtgtacaaaaagactctgtttgtagaattcacggatcaccttttcaacatcgctaagccaaggccaccctggatgggtctgctaggtcctaccatccaggctgaggtttatgatacagtggtcattacacttaagaacatggcttcccatcctgtcagtcttcatgctgttggtgtatcctactggaaagcttctgagggagctgaatatgatgatcagaccagtcaaagggagaaagaagatgataaagtcttccctggtggaagccatacatatgtctggcaggtcctgaaagagaatggtccaatggcctctgacccactgtgccttacctactcatatctttctcatgtggacctggtaaaagacttgaattcaggcctcattggagccctactagtatgtagagaagggagtctggccaaggaaaagacacagaccttgcacaaatttatactactttttgctgtatttgatgaagggaaaagttggcactcagaaacaaagaactccttgatgcaggatagggatgctgcatctgctcgggcctggcctaaaatgcacacagtcaatggttatgtaaacaggtctctgccaggtctgattggatgccacaggaaatcagtctattggcatgtgattggaatgggcaccactcctgaagtgcactcaatattcctcgaaggtcacacatttcttgtgaggaaccatcgccaggctagcttggaaatctcgccaataactttccttactgctcaaacactcttgatggaccttggacagtttctactgttttgtcatatctcttcccaccaacatgatggcatggaagcttatgtcaaagtagacagctgtccagaggaaccccaactacgaatgaaaaataatgaagaagcggaagactatgatgatgatcttactgattctgaaatggatgtggtcaggtttgatgatgacaactctccttcctttatccaaattcgctcagttgccaagaagcatcctaaaacttgggtacattacattgctgctgaagaggaggactgggactatgctcccttagtcggcgcgccaaccagtacggagccgtccgaggggagcgcaccaggaagcccggctgggagcccgacttctaccgaagagggtacatctaccgaaccaagtgaaggttcagcaccaggcacctcaacagaaccctctgagggctcggcgcctggtacaagtgagtccgccaccccagaatccgggcctgggacaagcacagaaccttcggaagggagtgcccctggaacatccgaatcggcaaccccagaatcagggccaggatctgagcccgcgacttcgggctccgagacgcctgggacatccaccgagccctccgaaggatcagccccaggcaccagcacggagccctctgagggaagcgcacctggtaccagcgaaagcgcaactcccgaatcaggtcccggtacgagcgagtcggcgaccccggagagcgggccaggtgcctcgagcctcgcccccgatgacagaagttataaaagtcaatatttgaacaatggccctcagcggattggtaggaagtacaaaaaagtccgatttatggcatacacagatgaaacctttaagactcgtgaagctattcagcatgaatcaggaatcttgggacctttactttatggggaagttggagacacactgttgattatatttaagaatcaagcaagcagaccatataacatctaccctcacggaatcactgatgtccgtcctttgtattcaaggagattaccaaaaggtgtaaaacatttgaaggattttccaattctgccaggagaaatattcaaatataaatggacagtgactgtagaagatgggccaactaaatcagatcctcggtgcctgacccgctattactctagtttcgttaatatggagagagatctagcttcaggactcattggccctctcctcatctgctacaaagaatctgtagatcaaagaggaaaccagataatgtcagacaagaggaatgtcatcctgttttctgtatttgatgagaaccgaagctggtacctcacagagaatatacaacgctttctccccaatccagctggagtgcagcttgaggatccagagttccaagcctccaacatcatgcacagcatcaatggctatgtttttgatagtttgcagttgtcagtttgtttgcatgaggtggcatactggtacattctaagcattggagcacagactgacttcctttctgtcttcttctctggatataccttcaaacacaaaatggtctatgaagacacactcaccctattcccattctcaggagaaactgtcttcatgtcgatggaaaacccaggtctatggattctggggtgccacaactcagactttcggaacagaggcatgaccgccttactgaaggtttctagttgtgacaagaacactggtgattattacgaggacagttatgaagatatttcagcatacttgctgagtaaaaacaatgccattgaaccaagaagcttctctcaaaacggcgcgccaagtcccgctggaagcccaactagcaccgaagaggggacctcagagtccgccacccccgagtccggccctggctctgagcctgccactagcggctccgagactcctggcacatccgaaagcgctacacccgagagtggacccggcacctctaccgagcccagtgagggctccgcccctggaacaagcaccgagcccagcgaaggcagcgccccagggacctccacagagcccagtgaaggcagtgctcctggcaccagcaccgaaccaagcgagggctctgcacccgggacctccaccgagccaagcgaaggctctgcccctggcacttccaccgagcccagcgaaggcagcgcccctgggagccccgctggctctcccaccagcactgaggagggcacatctaccgaaccaagtgaaggctctgcaccaggtgcctcgagcccaccagtcttgaaacgccatcaagctgaaataactcgtactactcttcagtcagatcaagaggaaatcgattatgatgataccatatcagttgaaatgaagaaggaagattttgacatttatgatgaggatgaaaatcagagcccccgcagctttcaaaagaaaacacgacactattttattgctgcagtggagaggctctgggattatgggatgagtagctccccacatgttctaagaaacagggctcagagtggcagtgtccctcagttcaagaaagttgttttccaggaatttactgatggctcctttactcagcccttataccgtggagaactaaatgaacatttgggactcctggggccatatataagagcagaagttgaagataatatcatggtaactttcagaaatcaggcctctcgtccctattccttctattctagccttatttcttatgaggaagatcagaggcaaggagcagaacctagaaaaaactttgtcaagcctaatgaaaccaaaacttacttttggaaagtgcaacatcatatggcacccactaaagatgagtttgactgcaaagcctgggcttatttctctgatgttgacctggaaaaagatgtgcactcaggcctgattggaccccttctggtctgccacactaacacactgaaccctgctcatgggagacaagtgacagtacaggaatttgctctgtttttcaccatctttgatgagaccaaaagctggtacttcactgaaaatatggaaagaaactgcagggctccctgcaatatccagatggaagatcccacttttaaagagaattatcgcttccatgcaatcaatggctacataatggatacactacctggcttagtaatggctcaggatcaaaggattcgatggtatctgctcagcatgggcagcaatgaaaacatccattctattcatttcagtggacatgtgttcactgtacgaaaaaaagaggagtataaaatggcactgtacaatctctatccaggtgtttttgagacagtggaaatgttaccatccaaagctggaatttggcgggtggaatgccttattggcgagcatctacatgctgggatgagcacactttttctggtgtacagcaataagtgtcagactcccctgggaatggcttctggacacattagagattttcagattacagcttcaggacaatatggacagtgggccccaaagctggccagacttcattattccggatcaatcaatgcctggagcaccaaggagcccttttcttggatcaaggtggatctgttggcaccaatgattattcacggcatcaagacccagggtgcccgtcagaagttctccagcctctacatctctcagtttatcatcatgtatagtcttgatgggaagaagtggcagacttatcgaggaaattccactggaaccttaatggtcttctttggcaatgtggattcatctgggataaaacacaatatttttaaccctccaattattgctcgatacatccgtttgcacccaactcattatagcattcgcagcactcttcgcatggagttgatgggctgtgatttaaatagttgcagcatgccattgggaatggagagtaaagcaatatcagatgcacagattactgcttcatcctactttaccaatatgtttgccacctggtctccttcaaaagctcgacttcacctccaagggaggagtaatgcctggagacctcaggtgaataatccaaaagagtggctgcaagtggacttccagaagacaatgaaagtcacaggagtaactactcagggagtaaaatctctgcttaccagcatgtatgtgaaggagttcctcatctccagcagtcaagatggccatcagtggactctcttttttcagaatggcaaagtaaaggtttttcagggaaatcaagactccttcacacctgtggtgaactctctagacccaccgttactgactcgctaccttcgaattcacccccagagttgggtgcaccagattgccctgaggatggaggttctgggctgcgaggcacaggacctctacggcgcgccaggtacctcagagtctgctacccccgagtcagggccaggatcagagccagccacctccgggtctgagacacccgggacttccgagagtgccacccctgagtccggacccgggtccgagcccgccacttccggctccgaaactcccggcacaagcgagagcgctaccccagagtcaggaccaggaacatctacagagccctctgaaggctccgctccagggtccccagccggcagtcccactagcaccgaggagggaacctctgaaagcgccacacccgaatcagggccagggtctgagcctgctaccagcggcagcgagacaccaggcacctctgagtccgccacaccagagtccggacccggatctcccgctgggagccccacctccactgaggagggatctcctgctggctctccaacatctactgaggaaggtacctcaaccgagccatccgagggatcagctcccggcacctcagagtcggcaaccccggagtctggacccggaacttccgaaagtgccacaccagagtccggtcccgggacttcagaatcagcaacacccgagtccggccctgggtctgaacccgccacaagtggtagtgagacaccaggatcagaacctgctacctcagggtcagagacacccggatctccggcaggctcaccaacctccactgaggagggcaccagcacagaaccaagcgagggctccgcacccggaacaagcactgaacccagtgagggttcagcacccggctctgagccggccacaagtggcagtgagacacccggcacttcagagagtgccacccccgagagtggcccaggcactagtaccgagccctctgaaggcagtgcgccagcctcgagcgaacaaaaactcatctcagaagaggatctgtcacctgcaaccggtcatcatcaccatcaccattga

SEQ ID NO: 1095 - protein, 2053 aa, synthetic construct
  REGION 1..2053: note = Description of Artificial Sequence: Synthetic polypeptide
ATRRYYLGAVELSWDYMQSDLGELPVDARFPPRVPKSFPFNTSVVYKKTLFVEFTDHLFNIAKPRPPWMGLLGPTIQAEVYDTVVITLKNMASHPVSLHAVGVSYWKASEGAEYDDQTSQREKEDDKVFPGGSHTYVWQVLKENGPMASDPLCLTYSYLSHVDLVKDLNSGLIGALLVCREGSLAKEKTQTLHKFILLFAVFDEGKSWHSETKNSLMQDRDAASARAWPKMHTVNGYVNRSLPGLIGCHRKSVYWHVIGMGTTPEVHSIFLEGHTFLVRNHRQASLEISPITFLTAQTLLMDLGQFLLFCHISSHQHDGMEAYVKVDSCPEEPQLRMKNNEEAEDYDDDLTDSEMDVVRFDDDNSPSFIQIRSVAKKHPKTWVHYIAAEEEDWDYAPLVLAPDGAPGASPGTSSTGSPGSSPSASTGTGPGSSPSASTGTGPGTPGSGTASSSPGSSTPSGATGSPGSSPSASTGTGPGASPGTSSTGSPGTPGSGTASSSPGSSTPSGATGSPGTPGSGTASSSPGASPGTSSTGSPGASPGTSSTGSPASSDRSYKSQYLNNGPQRIGRKYKKVRFMAYTDETFKTREAIQHESGILGPLLYGEVGDTLLIIFKNQASRPYNIYPHGITDVRPLYSRRLPKGVKHLKDFPILPGEIFKYKWTVTVEDGPTKSDPRCLTRYYSSFVNMERDLASGLIGPLLICYKESVDQRGNQIMSDKRNVILFSVFDENRSWYLTENIQRFLPNPAGVQLEDPEFQASNIMHSINGYVFDSLQLSVCLHEVAYWYILSIGAQTDFLSVFFSGYTFKHKMVYEDTLTLFPFSGETVFMSMENPGLWILGCHNSDFRNRGMTALLKVSSCDKNTGDYYEDSYEDISAYLLSKNNAIEPRSFSQNGAPSPAGSPTSTEEGTSESATPESGPGSEPATSGSETPGTSESATPESGPGTSTEPSEGSAPGTSTEPSEGSAPGTSTEPSEGSAPGTSTEPSEGSAPGTSTEPSEGSAPGTSTEPSEGSAPGSPAGSPTSTEEGTSTEPSEGSAPGASSPPVLKRHQREITRTTLQSDQEEIDYDDTISVEMKKEDFDIYDEDENQSPRSFQKKTRHYFIAAVERLWDYGMSSSPHVLRNRAQSGSVPQFKKVVFQEFTDGSFTQPLYRGELNEHLGLLGPYIRAEVEDNIMVTFRNQASRPYSFYSSLISYEEDQRQGAEPRKNFVKPNETKTYFWKVQHHMAPTKDEFDCKAWAYFSDVDLEKDVHSGLIGPLLVCHTNTLNPAHGRQVTVQEFALFFTIFDETKSWYFTENMERNCRAPCNIQMEDPTFKENYRFHAINGYIMDTLPGLVMAQDQRIRWYLLSMGSNENIHSIHFSGHVFTVRKKEEYKMALYNLYPGVFETVEMLPSKAGIWRVECLIGEHLHAGMSTLFLVYSNKCQTPLGMASGHIRDFQITASGQYGQWAPKLARLHYSGSINAWSTKEPFSWIKVDLLAPMIIHGIKTQGARQKFSSLYISQFIIMYSLDGKKWQTYRGNSTGTLMVFFGNVDSSGIKHNIFNPPIIARYIRLHPTHYSIRSTLRMELMGCDLNSCSMPLGMESKAISDAQITASSYFTNMFATWSPSKARLHLQGRSNAWRPQVNNPKEWLQVDFQKTMKVTGVTTQGVKSLLTSMYVKEFLISSSQDGHQWTLFFQNGKVKVFQGNQDSFTPVVNSLDPPLLTRYLRIHPQSWVHQIALRMEVLGCEAQDLYGAPGTSESATPESGPGSEPATSGSETPGTSESATPESGPGSEPATSGSETPGTSESATPESGPGTSTEPSEGSAPGSPAGSPTSTEEGTSESATPESGPGSEPATSGSETPGTSESATPESGPGSPAGSPTSTEEGSPAGSPTSTEEGTSTEPSEGSAPGTSESATPESGPGTSESATPESGPGTSESATPESGPGSEPATSGSETPGSEPATSGSETPGSPAGSPTSTEEGTSTEPSEGSAPGTSTEPSEGSAPGSEPATSGSETPGTSESATPESGPGTSTEPSEGSAPASSEQKLISEEDLSPATGHHHHHH

SEQ ID NO: 1096 - DNA, 6162 bp, synthetic construct
  misc_feature 1..6162: note = Description of Artificial Sequence: Synthetic polynucleotide
  source 1..6162: mol_type = other DNA
gccaccagaagatactacctgggtgcagtggaactgtcatgggactatatgcaaagtgatctcggtgagctgcctgtggacgcaagatttcctcctagagtgccaaaatcttttccattcaacacctcagtcgtgtacaaaaagactctgtttgtagaattcacggatcaccttttcaacatcgctaagccaaggccaccctggatgggtctgctaggtcctaccatccaggctgaggtttatgatacagtggtcattacacttaagaacatggcttcccatcctgtcagtcttcatgctgttggtgtatcctactggaaagcttctgagggagctgaatatgatgatcagaccagtcaaagggagaaagaagatgataaagtcttccctggtggaagccatacatatgtctggcaggtcctgaaagagaatggtccaatggcctctgacccactgtgccttacctactcatatctttctcatgtggacctggtaaaagacttgaattcaggcctcattggagccctactagtatgtagagaagggagtctggccaaggaaaagacacagaccttgcacaaatttatactactttttgctgtatttgatgaagggaaaagttggcactcagaaacaaagaactccttgatgcaggatagggatgctgcatctgctcgggcctggcctaaaatgcacacagtcaatggttatgtaaacaggtctctgccaggtctgattggatgccacaggaaatcagtctattggcatgtgattggaatgggcaccactcctgaagtgcactcaatattcctcgaaggtcacacatttcttgtgaggaaccatcgccaggctagcttggaaatctcgccaataactttccttactgctcaaacactcttgatggaccttggacagtttctactgttttgtcatatctcttcccaccaacatgatggcatggaagcttatgtcaaagtagacagctgtccagaggaaccccaactacgaatgaaaaataatgaagaagcggaagactatgatgatgatcttactgattctgaaatggatgtggtcaggtttgatgatgacaactctccttcctttatccaaattcgctcagttgccaagaagcatcctaaaacttgggtacattacattgctgctgaagaggaggactgggactatgctcccttagtcctcgcccccgatggcgcgccaggtgcctcgccgggaacatcatcaactggttcacccgggtcatccccctcggcctcaaccgggacgggtcccggctcatcccccagcgccagcactggaacaggtcctggcactcctggttccggtacggcatcgtcatccccgggaagctcaacaccgtccggagcgacaggatcacctggctcgtcaccttcggcgtcaactggaacggggccaggggcctcacccggaacgtcctcgactgggtcgcctggtacgccgggatcaggaacggcctcatcctcgcctgggtcctcaacgccctcgggtgcgactggttcgccgggaactcctggctcggggacggcctcgtcgtcgcctggggcatcaccggggacgagctccacggggtcccctggagcgtcaccggggacctcctcgacaggtagcccggcctcgagcgacagaagttataaaagtcaatatttgaacaatggccctcagcggattggtaggaagtacaaaaaagtccgatttatggcatacacagatgaaacctttaagactcgtgaagctattcagcatgaatcaggaatcttgggacctttactttatggggaagttggagacacactgttgattatatttaagaatcaagcaagcagaccatataacatctaccctcacggaatcactgatgtccgtcctttgtattcaaggagattaccaaaaggtgtaaaacatttgaaggattttccaattctgccaggagaaatattcaaatataaatggacagtgactgtagaagatgggccaactaaatcagatcctcggtgcctgacccgctattactctagtttcgttaatatggagagagatctagcttcaggactcattggccctctcctcatctgctacaaagaatctgtagatcaaagaggaaaccagataatgtcagacaagaggaatgtcatcctgttttctgtatttgatgagaaccgaagctggtacctcacagagaatatacaacgctttctccccaatccagctggagtgcagcttgaggatccagagttccaagcctccaacatcatgcacagcatcaatggctatgtttttgatagtttgcagttgtcagtttgtttgcatgaggtggcatactggtacattctaagcattggagcacagactgacttcctttctgtcttcttctctggatataccttcaaacacaaaatggtctatgaagacacactcaccctattcccattctcaggagaaactgtcttcatgtcgatggaaaacccaggtctatggattctggggtgccacaactcagactttcggaacagaggcatgaccgccttactgaaggtttctagttgtgacaagaacactggtgattattacgaggacagttatgaagatatttcagcatacttgctgagtaaaaacaatgccattgaaccaagaagcttctctcaaaacggcgcgccaagtcccgctggaagcccaactagcaccgaagaggggacctcagagtccgccacccccgagtccggccctggctctgagcctgccactagcggctccgagactcctggcacatccgaaagcgctacacccgagagtggacccggcacctctaccgagcccagtgagggctccgcccctggaacaagcaccgagcccagcgaaggcagcgccccagggacctccacagagcccagtgaaggcagtgctcctggcaccagcaccgaaccaagcgagggctctgcacccgggacctccaccgagccaagcgaaggctctgcccctggcacttccaccgagcccagcgaaggcagcgcccctgggagccccgctggctctcccaccagcactgaggagggcacatctaccgaaccaagtgaaggctctgcaccaggtgcctcgagcccaccagtcttgaaacgccatcaacgggaaataactcgtactactcttcagtcagatcaagaggaaatcgattatgatgataccatatcagttgaaatgaagaaggaagattttgacatttatgatgaggatgaaaatcagagcccccgcagctttcaaaagaaaacacgacactattttattgctgcagtggagaggctctgggattatgggatgagtagctccccacatgttctaagaaacagggctcagagtggcagtgtccctcagttcaagaaagttgttttccaggaatttactgatggctcctttactcagcccttataccgtggagaactaaatgaacatttgggactcctggggccatatataagagcagaagttgaagataatatcatggtaactttcagaaatcaggcctctcgtccctattccttctattctagccttatttcttatgaggaagatcagaggcaaggagcagaacctagaaaaaactttgtcaagcctaatgaaaccaaaacttacttttggaaagtgcaacatcatatggcacccactaaagatgagtttgactgcaaagcctgggcttatttctctgatgttgacctggaaaaagatgtgcactcaggcctgattggaccccttctggtctgccacactaacacactgaaccctgctcatgggagacaagtgacagtacaggaatttgctctgtttttcaccatctttgatgagaccaaaagctggtacttcactgaaaatatggaaagaaactgcagggctccctgcaatatccagatggaagatcccacttttaaagagaattatcgcttccatgcaatcaatggctacataatggatacactacctggcttagtaatggctcaggatcaaaggattcgatggtatctgctcagcatgggcagcaatgaaaacatccattctattcatttcagtggacatgtgttcactgtacgaaaaaaagaggagtataaaatggcactgtacaatctctatccaggtgtttttgagacagtggaaatgttaccatccaaagctggaatttggcgggtggaatgccttattggcgagcatctacatgctgggatgagcacactttttctggtgtacagcaataagtgtcagactcccctgggaatggcttctggacacattagagattttcagattacagcttcaggacaatatggacagtgggccccaaagctggccagacttcattattccggatcaatcaatgcctggagcaccaaggagcccttttcttggatcaaggtggatctgttggcaccaatgattattcacggcatcaagacccagggtgcccgtcagaagttctccagcctctacatctctcagtttatcatcatgtatagtcttgatgggaagaagtggcagacttatcgaggaaattccactggaaccttaatggtcttctttggcaatgtggattcatctgggataaaacacaatatttttaaccctccaattattgctcgatacatccgtttgcacccaactcattatagcattcgcagcactcttcgcatggagttgatgggctgtgatttaaatagttgcagcatgccattgggaatggagagtaaagcaatatcagatgcacagattactgcttcatcctactttaccaatatgtttgccacctggtctccttcaaaagctcgacttcacctccaagggaggagtaatgcctggagacctcaggtgaataatccaaaagagtggctgcaagtggacttccagaagacaatgaaagtcacaggagtaactactcagggagtaaaatctctgcttaccagcatgtatgtgaaggagttcctcatctccagcagtcaagatggccatcagtggactctcttttttcagaatggcaaagtaaaggtttttcagggaaatcaagactccttcacacctgtggtgaactctctagacccaccgttactgactcgctaccttcgaattcacccccagagttgggtgcaccagattgccctgaggatggaggttctgggctgcgaggcacaggacctctacggcgcgccaggtacctcagagtctgctacccccgagtcagggccaggatcagagccagccacctccgggtctgagacacccgggacttccgagagtgccacccctgagtccggacccgggtccgagcccgccacttccggctccgaaactcccggcacaagcgagagcgctaccccagagtcaggaccaggaacatctacagagccctctgaaggctccgctccagggtccccagccggcagtcccactagcaccgaggagggaacctctgaaagcgccacacccgaatcagggccagggtctgagcctgctaccagcggcagcgagacaccaggcacctctgagtccgccacaccagagtccggacccggatctcccgctgggagccccacctccactgaggagggatctcctgctggctctccaacatctactgaggaaggtacctcaaccgagccatccgagggatcagctcccggcacctcagagtcggcaaccccggagtctggacccggaacttccgaaagtgccacaccagagtccggtcccgggacttcagaatcagcaacacccgagtccggccctgggtctgaacccgccacaagtggtagtgagacaccaggatcagaacctgctacctcagggtcagagacacccggatctccggcaggctcaccaacctccactgaggagggcaccagcacagaaccaagcgagggctccgcacccggaacaagcactgaacccagtgagggttcagcacccggctctgagccggccacaagtggcagtgagacacccggcacttcagagagtgccacccccgagagtggcccaggcactagtaccgagccctctgaaggcagtgcgccagcctcgagcgaacaaaaactcatctcagaagaggatctgtcacctgcaaccggtcatcatcaccatcaccattga

SEQ ID NO: 1097 - protein, 2053 aa, synthetic construct
  REGION 1..2053: note = Description of Artificial Sequence: Synthetic polypeptide
ATRRYYLGAVELSWDYMQSDLGELPVDARFPPRVPKSFPFNTSVVYKKTLFVEFTDHLFNIAKPRPPWMGLLGPTIQAEVYDTVVITLKNMASHPVSLHAVGVSYWKASEGAEYDDQTSQREKEDDKVFPGGSHTYVWQVLKENGPMASDPLCLTYSYLSHVDLVKDLNSGLIGALLVCREGSLAKEKTQTLHKFILLFAVFDEGKSWHSETKNSLMQDRDAASARAWPKMHTVNGYVNRSLPGLIGCHRKSVYWHVIGMGTTPEVHSIFLEGHTFLVRNHRQASLEISPITFLTAQTLLMDLGQFLLFCHISSHQHDGMEAYVKVDSCPEEPQLRMKNNEEAEDYDDDLTDSEMDVVRFDDDNSPSFIQIRSVAKKHPKTWVHYIAAEEEDWDYAPLVGAPTSTEPSEGSAPGSPAGSPTSTEEGTSTEPSEGSAPGTSTEPSEGSAPGTSESATPESGPGTSTEPSEGSAPGTSESATPESGPGSEPATSGSETPGTSTEPSEGSAPGTSTEPSEGSAPGTSESATPESGPGTSESATPESGPGASSLAPDDRSYKSQYLNNGPQRIGRKYKKVRFMAYTDETFKTREAIQHESGILGPLLYGEVGDTLLIIFKNQASRPYNIYPHGITDVRPLYSRRLPKGVKHLKDFPILPGEIFKYKWTVTVEDGPTKSDPRCLTRYYSSFVNMERDLASGLIGPLLICYKESVDQRGNQIMSDKRNVILFSVFDENRSWYLTENIQRFLPNPAGVQLEDPEFQASNIMHSINGYVFDSLQLSVCLHEVAYWYILSIGAQTDFLSVFFSGYTFKHKMVYEDTLTLFPFSGETVFMSMENPGLWILGCHNSDFRNRGMTALLKVSSCDKNTGDYYEDSYEDISAYLLSKNNAIEPRSFSQNGAPSPAGSPTSTEEGTSESATPESGPGSEPATSGSETPGTSESATPESGPGTSTEPSEGSAPGTSTEPSEGSAPGTSTEPSEGSAPGTSTEPSEGSAPGTSTEPSEGSAPGTSTEPSEGSAPGSPAGSPTSTEEGTSTEPSEGSAPGASSPPVLKRHQREITRTTLQSDQEEIDYDDTISVEMKKEDFDIYDEDENQSPRSFQKKTRHYFIAAVERLWDYGMSSSPHVLRNRAQSGSVPQFKKVVFQEFTDGSFTQPLYRGELNEHLGLLGPYIRAEVEDNIMVTFRNQASRPYSFYSSLISYEEDQRQGAEPRKNFVKPNETKTYFWKVQHHMAPTKDEFDCKAWAYFSDVDLEKDVHSGLIGPLLVCHTNTLNPAHGRQVTVQEFALFFTIFDETKSWYFTENMERNCRAPCNIQMEDPTFKENYRFHAINGYIMDTLPGLVMAQDQRIRWYLLSMGSNENIHSIHFSGHVFTVRKKEEYKMALYNLYPGVFETVEMLPSKAGIWRVECLIGEHLHAGMSTLFLVYSNKCQTPLGMASGHIRDFQITASGQYGQWAPKLARLHYSGSINAWSTKEPFSWIKVDLLAPMIIHGIKTQGARQKFSSLYISQFIIMYSLDGKKWQTYRGNSTGTLMVFFGNVDSSGIKHNIFNPPIIARYIRLHPTHYSIRSTLRMELMGCDLNSCSMPLGMESKAISDAQITASSYFTNMFATWSPSKARLHLQGRSNAWRPQVNNPKEWLQVDFQKTMKVTGVTTQGVKSLLTSMYVKEFLISSSQDGHQWTLFFQNGKVKVFQGNQDSFTPVVNSLDPPLLTRYLRIHPQSWVHQIALRMEVLGCEAQDLYGAPGTSESATPESGPGSEPATSGSETPGTSESATPESGPGSEPATSGSETPGTSESATPESGPGTSTEPSEGSAPGSPAGSPTSTEEGTSESATPESGPGSEPATSGSETPGTSESATPESGPGSPAGSPTSTEEGSPAGSPTSTEEGTSTEPSEGSAPGTSESATPESGPGTSESATPESGPGTSESATPESGPGSEPATSGSETPGSEPATSGSETPGSPAGSPTSTEEGTSTEPSEGSAPGTSTEPSEGSAPGSEPATSGSETPGTSESATPESGPGTSTEPSEGSAPASSEQKLISEEDLSPATGHHHHHH

SEQ ID NO: 1098 - DNA, 6162 bp, synthetic construct
  misc_feature 1..6162: note = Description of Artificial Sequence: Synthetic polynucleotide
  source 1..6162: mol_type = other DNA
gccaccagaagatactacctgggtgcagtggaactgtcatgggactatatgcaaagtgatctcggtgagctgcctgtggacgcaagatttcctcctagagtgccaaaatcttttccattcaacacctcagtcgtgtacaaaaagactctgtttgtagaattcacggatcaccttttcaacatcgctaagccaaggccaccctggatgggtctgctaggtcctaccatccaggctgaggtttatgatacagtggtcattacacttaagaacatggcttcccatcctgtcagtcttcatgctgttggtgtatcctactggaaagcttctgagggagctgaatatgatgatcagaccagtcaaagggagaaagaagatgataaagtcttccctggtggaagccatacatatgtctggcaggtcctgaaagagaatggtccaatggcctctgacccactgtgccttacctactcatatctttctcatgtggacctggtaaaagacttgaattcaggcctcattggagccctactagtatgtagagaagggagtctggccaaggaaaagacacagaccttgcacaaatttatactactttttgctgtatttgatgaagggaaaagttggcactcagaaacaaagaactccttgatgcaggatagggatgctgcatctgctcgggcctggcctaaaatgcacacagtcaatggttatgtaaacaggtctctgccaggtctgattggatgccacaggaaatcagtctattggcatgtgattggaatgggcaccactcctgaagtgcactcaatattcctcgaaggtcacacatttcttgtgaggaaccatcgccaggctagcttggaaatctcgccaataactttccttactgctcaaacactcttgatggaccttggacagtttctactgttttgtcatatctcttcccaccaacatgatggcatggaagcttatgtcaaagtagacagctgtccagaggaaccccaactacgaatgaaaaataatgaagaagcggaagactatgatgatgatcttactgattctgaaatggatgtggtcaggtttgatgatgacaactctccttcctttatccaaattcgctcagttgccaagaagcatcctaaaacttgggtacattacattgctgctgaagaggaggactgggactatgctcccttagtcggcgcgccaaccagtacggagccgtccgaggggagcgcaccaggaagcccggctgggagcccgacttctaccgaagagggtacatctaccgaaccaagtgaaggttcagcaccaggcacctcaacagaaccctctgagggctcggcgcctggtacaagtgagtccgccaccccagaatccgggcctgggacaagcacagaaccttcggaagggagtgcccctggaacatccgaatcggcaaccccagaatcagggccaggatctgagcccgcgacttcgggctccgagacgcctgggacatccaccgagccctccgaaggatcagccccaggcaccagcacggagccctctgagggaagcgcacctggtaccagcgaaagcgcaactcccgaatcaggtcccggtacgagcgagtcggcgaccccggagagcgggccaggtgcctcgagcctcgcccccgatgacagaagttataaaagtcaatatttgaacaatggccctcagcggattggtaggaagtacaaaaaagtccgatttatggcatacacagatgaaacctttaagactcgtgaagctattcagcatgaatcaggaatcttgggacctttactttatggggaagttggagacacactgttgattatatttaagaatcaagcaagcagaccatataacatctaccctcacggaatcactgatgtccgtcctttgtattcaaggagattaccaaaaggtgtaaaacatttgaaggattttccaattctgccaggagaaatattcaaatataaatggacagtgactgtagaagatgggccaactaaatcagatcctcggtgcctgacccgctattactctagtttcgttaatatggagagagatctagcttcaggactcattggccctctcctcatctgctacaaagaatctgtagatcaaagaggaaaccagataatgtcagacaagaggaatgtcatcctgttttctgtatttgatgagaaccgaagctggtacctcacagagaatatacaacgctttctccccaatccagctggagtgcagcttgaggatccagagttccaagcctccaacatcatgcacagcatcaatggctatgtttttgatagtttgcagttgtcagtttgtttgcatgaggtggcatactggtacattctaagcattggagcacagactgacttcctttctgtcttcttctctggatataccttcaaacacaaaatggtctatgaagacacactcaccctattcccattctcaggagaaactgtcttcatgtcgatggaaaacccaggtctatggattctggggtgccacaactcagactttcggaacagaggcatgaccgccttactgaaggtttctagttgtgacaagaacactggtgattattacgaggacagttatgaagatatttcagcatacttgctgagtaaaaacaatgccattgaaccaagaagcttctctcaaaacggcgcgccaagtcccgctggaagcccaactagcaccgaagaggggacctcagagtccgccacccccgagtccggccctggctctgagcctgccactagcggctccgagactcctggcacatccgaaagcgctacacccgagagtggacccggcacctctaccgagcccagtgagggctccgcccctggaacaagcaccgagcccagcgaaggcagcgccccagggacctccacagagcccagtgaaggcagtgctcctggcaccagcaccgaaccaagcgagggctctgcacccgggacctccaccgagccaagcgaaggctctgcccctggcacttccaccgagcccagcgaaggcagcgcccctgggagccccgctggctctcccaccagcactgaggagggcacatctaccgaaccaagtgaaggctctgcaccaggtgcctcgagcccaccagtcttgaaacgccatcaacgggaaataactcgtactactcttcagtcagatcaagaggaaatcgattatgatgataccatatcagttgaaatgaagaaggaagattttgacatttatgatgaggatgaaaatcagagcccccgcagctttcaaaagaaaacacgacactattttattgctgcagtggagaggctctgggattatgggatgagtagctccccacatgttctaagaaacagggctcagagtggcagtgtccctcagttcaagaaagttgttttccaggaatttactgatggctcctttactcagcccttataccgtggagaactaaatgaacatttgggactcctggggccatatataagagcagaagttgaagataatatcatggtaactttcagaaatcaggcctctcgtccctattccttctattctagccttatttcttatgaggaagatcagaggcaaggagcagaacctagaaaaaactttgtcaagcctaatgaaaccaaaacttacttttggaaagtgcaacatcatatggcacccactaaagatgagtttgactgcaaagcctgggcttatttctctgatgttgacctggaaaaagatgtgcactcaggcctgattggaccccttctggtctgccacactaacacactgaaccctgctcatgggagacaagtgacagtacaggaatttgctctgtttttcaccatctttgatgagaccaaaagctggtacttcactgaaaatatggaaagaaactgcagggctccctgcaatatccagatggaagatcccacttttaaagagaattatcgcttccatgcaatcaatggctacataatggatacactacctggcttagtaatggctcaggatcaaaggattcgatggtatctgctcagcatgggcagcaatgaaaacatccattctattcatttcagtggacatgtgttcactgtacgaaaaaaagaggagtataaaatggcactgtacaatctctatccaggtgtttttgagacagtggaaatgttaccatccaaagctggaatttggcgggtggaatgccttattggcgagcatctacatgctgggatgagcacactttttctggtgtacagcaataagtgtcagactcccctgggaatggcttctggacacattagagattttcagattacagcttcaggacaatatggacagtgggccccaaagctggccagacttcattattccggatcaatcaatgcctggagcaccaaggagcccttttcttggatcaaggtggatctgttggcaccaatgattattcacggcatcaagacccagggtgcccgtcagaagttctccagcctctacatctctcagtttatcatcatgtatagtcttgatgggaagaagtggcagacttatcgaggaaattccactggaaccttaatggtcttctttggcaatgtggattcatctgggataaaacacaatatttttaaccctccaattattgctcgatacatccgtttgcacccaactcattatagcattcgcagcactcttcgcatggagttgatgggctgtgatttaaatagttgcagcatgccattgggaatggagagtaaagcaatatcagatgcacagattactgcttcatcctactttaccaatatgtttgccacctggtctccttcaaaagctcgacttcacctccaagggaggagtaatgcctggagacctcaggtgaataatccaaaagagtggctgcaagtggacttccagaagacaatgaaagtcacaggagtaactactcagggagtaaaatctctgcttaccagcatgtatgtgaaggagttcctcatctccagcagtcaagatggccatcagtggactctcttttttcagaatggcaaagtaaaggtttttcagggaaatcaagactccttcacacctgtggtgaactctctagacccaccgttactgactcgctaccttcgaattcacccccagagttgggtgcaccagattgccctgaggatggaggttctgggctgcgaggcacaggacctctacggcgcgccaggtacctcagagtctgctacccccgagtcagggccaggatcagagccagccacctccgggtctgagacacccgggacttccgagagtgccacccctgagtccggacccgggtccgagcccgccacttccggctccgaaactcccggcacaagcgagagcgctaccccagagtcaggaccaggaacatctacagagccctctgaaggctccgctccagggtccccagccggcagtcccactagcaccgaggagggaacctctgaaagcgccacacccgaatcagggccagggtctgagcctgctaccagcggcagcgagacaccaggcacctctgagtccgccacaccagagtccggacccggatctcccgctgggagccccacctccactgaggagggatctcctgctggctctccaacatctactgaggaaggtacctcaaccgagccatccgagggatcagctcccggcacctcagagtcggcaaccccggagtctggacccggaacttccgaaagtgccacaccagagtccggtcccgggacttcagaatcagcaacacccgagtccggccctgggtctgaacccgccacaagtggtagtgagacaccaggatcagaacctgctacctcagggtcagagacacccggatctccggcaggctcaccaacctccactgaggagggcaccagcacagaaccaagcgagggctccgcacccggaacaagcactgaacccagtgagggttcagcacccggctctgagccggccacaagtggcagtgagacacccggcacttcagagagtgccacccccgagagtggcccaggcactagtaccgagccctctgaaggcagtgcgccagcctcgagcgaacaaaaactcatctcagaagaggatctgtcacctgcaaccggtcatcatcaccatcaccattga

SEQ ID NO: 1099 - protein, 2053 aa, synthetic construct
  REGION 1..2053: note = Description of Artificial Sequence: Synthetic polypeptide
ATRRYYLGAVELSWDYMQSDLGELPVDARFPPRVPKSFPFNTSVVYKKTLFVEFTDHLFNIAKPRPPWMGLLGPTIQAEVYDTVVITLKNMASHPVSLHAVGVSYWKASEGAEYDDQTSQREKEDDKVFPGGSHTYVWQVLKENGPMASDPLCLTYSYLSHVDLVKDLNSGLIGALLVCREGSLAKEKTQTLHKFILLFAVFDEGKSWHSETKNSLMQDRDAASARAWPKMHTVNGYVNRSLPGLIGCHRKSVYWHVIGMGTTPEVHSIFLEGHTFLVRNHRQASLEISPITFLTAQTLLMDLGQFLLFCHISSHQHDGMEAYVKVDSCPEEPQLRMKNNEEAEDYDDDLTDSEMDVVRFDDDNSPSFIQIRSVAKKHPKTWVHYIAAEEEDWDYAPLVLAPDDRSYKSQYLNNGPQRIGRKYKKVRFMAYTDETFKTREAIQHESGILGPLLYGEVGDTLLIIFKNQASRPYNIYPHGITDVRPLYSRRLPKGVKHLKDFPILPGEIFKYKWTVTVEDGPTKSDPRCLTRYYSSFVNMERDLASGLIGPLLICYKESVDQRGNQIMSDKRNVILFSVFDENRSWYLTENIQRFLPNPAGVQLEDPEFQASNIMHSINGYVFDSLQLSVCLHEVAYWYILSIGAQTDFLSVFFSGYTFKHKMVYEDTLTLFPFSGETVFMSMENPGLWILGCHNSDFRNRGMTALLKVSSCDKNTGDYYEDSYEDISAYLLSKNNAIEPRSFSQNGAPSPAGSPTSTEEGTSESATPESGPGSEPATSGSETPGTSESATPESGPGTSTEPSEGSAPGTSTEPSEGSAPGTSTEPSEGSAPGTSTEPSEGSAPGTSTEPSEGSAPGTSTEPSEGSAPGSPAGSPTSTEEGTSTEPSEGSAPGASSPPVLKRHQAEITRTTLQSDQEEIDYDDTISVEMKKEDFDIYDEDENQSPRSFQKKTRHYFIAAVERLWDYGMSSSPHVLRNRAQSGGAPTSESATPESGPGSEPATSGSETPGTSESATPESGPGSEPATSGSETPGTSESATPESGPGTSTEPSEGSAPGTSESATPESGPGSPAGSPTSTEEGSPAGSPTSTEEGSPAGSPTSTEEGTSESATPESGPGTSTEPSEGSAPGASSSVPQFKKVVFQEFTDGSFTQPLYRGELNEHLGLLGPYIRAEVEDNIMVTFRNQASRPYSFYSSLISYEEDQRQGAEPRKNFVKPNETKTYFWKVQHHMAPTKDEFDCKAWAYFSDVDLEKDVHSGLIGPLLVCHTNTLNPAHGRQVTVQEFALFFTIFDETKSWYFTENMERNCRAPCNIQMEDPTFKENYRFHAINGYIMDTLPGLVMAQDQRIRWYLLSMGSNENIHSIHFSGHVFTVRKKEEYKMALYNLYPGVFETVEMLPSKAGIWRVECLIGEHLHAGMSTLFLVYSNKCQTPLGMASGHIRDFQITASGQYGQWAPKLARLHYSGSINAWSTKEPFSWIKVDLLAPMIIHGIKTQGARQKFSSLYISQFIIMYSLDGKKWQTYRGNSTGTLMVFFGNVDSSGIKHNIFNPPIIARYIRLHPTHYSIRSTLRMELMGCDLNSCSMPLGMESKAISDAQITASSYFTNMFATWSPSKARLHLQGRSNAWRPQVNNPKEWLQVDFQKTMKVTGVTTQGVKSLLTSMYVKEFLISSSQDGHQWTLFFQNGKVKVFQGNQDSFTPVVNSLDPPLLTRYLRIHPQSWVHQIALRMEVLGCEAQDLYGAPGTSESATPESGPGSEPATSGSETPGTSESATPESGPGSEPATSGSETPGTSESATPESGPGTSTEPSEGSAPGSPAGSPTSTEEGTSESATPESGPGSEPATSGSETPGTSESATPESGPGSPAGSPTSTEEGSPAGSPTSTEEGTSTEPSEGSAPGTSESATPESGPGTSESATPESGPGTSESATPESGPGSEPATSGSETPGSEPATSGSETPGSPAGSPTSTEEGTSTEPSEGSAPGTSTEPSEGSAPGSEPATSGSETPGTSESATPESGPGTSTEPSEGSAPASSEQKLISEEDLSPATGHHHHHH

SEQ ID NO: 1100 - DNA, 6162 bp, synthetic construct
  misc_feature 1..6162: note = Description of Artificial Sequence: Synthetic polynucleotide
  source 1..6162: mol_type = other DNA
gccaccagaagatactacctgggtgcagtggaactgtcatgggactatatgcaaagtgatctcggtgagctgcctgtggacgcaagatttcctcctagagtgccaaaatcttttccattcaacacctcagtcgtgtacaaaaagactctgtttgtagaattcacggatcaccttttcaacatcgctaagccaaggccaccctggatgggtctgctaggtcctaccatccaggctgaggtttatgatacagtggtcattacacttaagaacatggcttcccatcctgtcagtcttcatgctgttggtgtatcctactggaaagcttctgagggagctgaatatgatgatcagaccagtcaaagggagaaagaagatgataaagtcttccctggtggaagccatacatatgtctggcaggtcctgaaagagaatggtccaatggcctctgacccactgtgccttacctactcatatctttctcatgtggacctggtaaaagacttgaattcaggcctcattggagccctactagtatgtagagaagggagtctggccaaggaaaagacacagaccttgcacaaatttatactactttttgctgtatttgatgaagggaaaagttggcactcagaaacaaagaactccttgatgcaggatagggatgctgcatctgctcgggcctggcctaaaatgcacacagtcaatggttatgtaaacaggtctctgccaggtctgattggatgccacaggaaatcagtctattggcatgtgattggaatgggcaccactcctgaagtgcactcaatattcctcgaaggtcacacatttcttgtgaggaaccatcgccaggctagcttggaaatctcgccaataactttccttactgctcaaacactcttgatggaccttggacagtttctactgttttgtcatatctcttcccaccaacatgatggcatggaagcttatgtcaaagtagacagctgtccagaggaaccccaactacgaatgaaaaataatgaagaagcggaagactatgatgatgatcttactgattctgaaatggatgtggtcaggtttgatgatgacaactctccttcctttatccaaattcgctcagttgccaagaagcatcctaaaacttgggtacattacattgctgctgaagaggaggactgggactatgctcccttagtcctcgcccccgatgacagaagttataaaagtcaatatttgaacaatggccctcagcggattggtaggaagtacaaaaaagtccgatttatggcatacacagatgaaacctttaagactcgtgaagctattcagcatgaatcaggaatcttgggacctttactttatggggaagttggagacacactgttgattatatttaagaatcaagcaagcagaccatataacatctaccctcacggaatcactgatgtccgtcctttgtattcaaggagattaccaaaaggtgtaaaacatttgaaggattttccaattctgccaggagaaatattcaaatataaatggacagtgactgtagaagatgggccaactaaatcagatcctcggtgcctgacccgctattactctagtttcgttaatatggagagagatctagcttcaggactcattggccctctcctcatctgctacaaagaatctgtagatcaaagaggaaaccagataatgtcagacaagaggaatgtcatcctgttttctgtatttgatgagaaccgaagctggtacctcacagagaatatacaacgctttctccccaatccagctggagtgcagcttgaggatccagagttccaagcctccaacatcatgcacagcatcaatggctatgtttttgatagtttgcagttgtcagtttgtttgcatgaggtggcatactggtacattctaagcattggagcacagactgacttcctttctgtcttcttctctggatataccttcaaacacaaaatggtctatgaagacacactcaccctattcccattctcaggagaaactgtcttcatgtcgatggaaaacccaggtctatggattctggggtgccacaactcagactttcggaacagaggcatgaccgccttactgaaggtttctagttgtgacaagaacactggtgattattacgaggacagttatgaagatatttcagcatacttgctgagtaaaaacaatgccattgaaccaagaagcttctctcaaaacggcgcgccaagtcccgctggaagcccaactagcaccgaagaggggacctcagagtccgccacccccgagtccggccctggctctgagcctgccactagcggctccgagactcctggcacatccgaaagcgctacacccgagagtggacccggcacctctaccgagcccagtgagggctccgcccctggaacaagcaccgagcccagcgaaggcagcgccccagggacctccacagagcccagtgaaggcagtgctcctggcaccagcaccgaaccaagcgagggctctgcacccgggacctccaccgagccaagcgaaggctctgcccctggcacttccaccgagcccagcgaaggcagcgcccctgggagccccgctggctctcccaccagcactgaggagggcacatctaccgaaccaagtgaaggctctgcaccaggtgcctcgagcccaccagtcttgaaacgccatcaagctgaaataactcgtactactcttcagtcagatcaagaggaaatcgattatgatgataccatatcagttgaaatgaagaaggaagattttgacatttatgatgaggatgaaaatcagagcccccgcagctttcaaaagaaaacacgacactattttattgctgcagtggagaggctctgggattatgggatgagtagctccccacatgttctaagaaacagggctcagagtggcggcgcgccaacgtccgaaagtgctacccctgagtcaggccctggtagtgagcctgccacaagcggaagcgaaactccggggacctcagagtctgccactcccgaatcggggccaggctctgaaccggccacttcagggagcgaaacaccaggaacatcggagagcgctaccccggagagcgggccaggaactagtactgagcctagcgagggaagtgcacctggtacaagcgagtccgccacacccgagtctggccctggctctccagcgggctcacccacgagcactgaagagggctctcccgctggcagcccaacgtcgacagaagaaggatcaccagcaggctcccccacatcaacagaggagggtacatcagaatctgctactcccgagagtggacccggtacctccactgagcccagcgaggggagtgcaccaggtgcctcgagcagtgtccctcagttcaagaaagttgttttccaggaatttactgatggctcctttactcagcccttataccgtggagaactaaatgaacatttgggactcctggggccatatataagagcagaagttgaagataatatcatggtaactttcagaaatcaggcctctcgtccctattccttctattctagccttatttcttatgaggaagatcagaggcaaggagcagaacctagaaaaaactttgtcaagcctaatgaaaccaaaacttacttttggaaagtgcaacatcatatggcacccactaaagatgagtttgactgcaaagcctgggcttatttctctgatgttgacctggaaaaagatgtgcactcaggcctgattggaccccttctggtctgccacactaacacactgaaccctgctcatgggagacaagtgacagtacaggaatttgctctgtttttcaccatctttgatgagaccaaaagctggtacttcactgaaaatatggaaagaaactgcagggctccctgcaatatccagatggaagatcccacttttaaagagaattatcgcttccatgcaatcaatggctacataatggatacactacctggcttagtaatggctcaggatcaaaggattcgatggtatctgctcagcatgggcagcaatgaaaacatccattctattcatttcagtggacatgtgttcactgtacgaaaaaaagaggagtataaaatggcactgtacaatctctatccaggtgtttttgagacagtggaaatgttaccatccaaagctggaatttggcgggtggaatgccttattggcgagcatctacatgctgggatgagcacactttttctggtgtacagcaataagtgtcagactcccctgggaatggcttctggacacattagagattttcagattacagcttcaggacaatatggacagtgggccccaaagctggccagacttcattattccggatcaatcaatgcctggagcaccaaggagcccttttcttggatcaaggtggatctgttggcaccaatgattattcacggcatcaagacccagggtgcccgtcagaagttctccagcctctacatctctcagtttatcatcatgtatagtcttgatgggaagaagtggcagacttatcgaggaaattccactggaaccttaatggtcttctttggcaatgtggattcatctgggataaaacacaatatttttaaccctccaattattgctcgatacatccgtttgcacccaactcattatagcattcgcagcactcttcgcatggagttgatgggctgtgatttaaatagttgcagcatgccattgggaatggagagtaaagcaatatcagatgcacagattactgcttcatcctactttaccaatatgtttgccacctggtctccttcaaaagctcgacttcacctccaagggaggagtaatgcctggagacctcaggtgaataatccaaaagagtggctgcaagtggacttccagaagacaatgaaagtcacaggagtaactactcagggagtaaaatctctgcttaccagcatgtatgtgaaggagttcctcatctccagcagtcaagatggccatcagtggactctcttttttcagaatggcaaagtaaaggtttttcagggaaatcaagactccttcacacctgtggtgaactctctagacccaccgttactgactcgctaccttcgaattcacccccagagttgggtgcaccagattgccctgaggatggaggttctgggctgcgaggcacaggacctctacggcgcgccaggtacctcagagtctgctacccccgagtcagggccaggatcagagccagccacctccgggtctgagacacccgggacttccgagagtgccacccctgagtccggacccgggtccgagcccgccacttccggctccgaaactcccggcacaagcgagagcgctaccccagagtcaggaccaggaacatctacagagccctctgaaggctccgctccagggtccccagccggcagtcccactagcaccgaggagggaacctctgaaagcgccacacccgaatcagggccagggtctgagcctgctaccagcggcagcgagacaccaggcacctctgagtccgccacaccagagtccggacccggatctcccgctgggagccccacctccactgaggagggatctcctgctggctctccaacatctactgaggaaggtacctcaaccgagccatccgagggatcagctcccggcacctcagagtcggcaaccccggagtctggacccggaacttccgaaagtgccacaccagagtccggtcccgggacttcagaatcagcaacacccgagtccggccctgggtctgaacccgccacaagtggtagtgagacaccaggatcagaacctgctacctcagggtcagagacacccggatctccggcaggctcaccaacctccactgaggagggcaccagcacagaaccaagcgagggctccgcacccggaacaagcactgaacccagtgagggttcagcacccggctctgagccggccacaagtggcagtgagacacccggcacttcagagagtgccacccccgagagtggcccaggcactagtaccgagccctctgaaggcagtgcgccagcctcgagcgaacaaaaactcatctcagaagaggatctgtcacctgcaaccggtcatcatcaccatcaccattga

SEQ ID NO: 1101 - protein, 2056 aa, synthetic construct
  REGION 1..2056: note = Description of Artificial Sequence: Synthetic polypeptide
ATRRYYLGAVELSWDYMQSDLGELPVDARFPPRVPKSFPFNTSVVYKKTLFVEFTDHLFNIAKPRPPWMGLLGPTIQAEVYDTVVITLKNMASHPVSLHAVGVSYWKASEGAEYDDQTSQREKEDDKVFPGGSHTYVWQVLKENGPMASDPLCLTYSYLSHVDLVKDLNSGLIGALLVCREGSLAKEKTQTLHKFILLFAVFDEGKSWHSETKNSLMQDRDAASARAWPKMHTVNGYVNRSLPGLIGCHRKSVYWHVIGMGTTPEVHSIFLEGHTFLVRNHRQASLEISPITFLTAQTLLMDLGQFLLFCHISSHQHDGMEAYVKVDSCPEEPQLRMKNNEEAEDYDDDLTDSEMDVVRFDDDNSPSFIQIRSVAKKHPKTWVHYIAAEEEDWDYAPLVLAPDDRSYKSQYLNNGPQRIGRKYKKVRFMAYTDETFKTREAIQHESGILGPLLYGEVGDTLLIIFKNQASRPYNIYPHGITDVRPLYSRRLPKGVKHLKDFPILPGEIFKYKWTVTVEDGPTKSDPRCLTRYYSSFVNMERDLASGLIGPLLICYKESVDQRGNQIMSDKRNVILFSVFDENRSWYLTENIQRFLPNPAGVQLEDPEFQASNIMHSINGYVFDSLQLSVCLHEVAYWYILSIGAQTDFLSVFFSGYTFKHKMVYEDTLTLFPFSGETVFMSMENPGLWILGCHNSDFRNRGMTALLKVSSCDKNTGDYYEDSYEDISAYLLSKNNAIEPRSFSQNGAPSPAGSPTSTEEGTSESATPESGPGSEPATSGSETPGTSESATPESGPGTSTEPSEGSAPGTSTEPSEGSAPGTSTEPSEGSAPGTSTEPSEGSAPGTSTEPSEGSAPGTSTEPSEGSAPGSPAGSPTSTEEGTSTEPSEGSAPGASSPPVLKRHQAEITRTTLQSDQEEIDYDDTISVEMKKEDFDIYDEDENQSPRSFQKKTRHYFIAAVERLWDYGMSSSPHVLRNRAQGAPGTPGSGTASSSPGASPGTSSTGSPGASPGTSSTGSPGASPGTSSTGSPGSSPSASTGTGPGTPGSGTASSSPGASPGTSSTGSPGASPGTSSTGSPGASPGTSSTGSPGSSTPSGATGSPGSSTPSGATGSPGASPGTSSTGSPASSRAQSGSVPQFKKVVFQEFTDGSFTQPLYRGELNEHLGLLGPYIRAEVEDNIMVTFRNQASRPYSFYSSLISYEEDQRQGAEPRKNFVKPNETKTYFWKVQHHMAPTKDEFDCKAWAYFSDVDLEKDVHSGLIGPLLVCHTNTLNPAHGRQVTVQEFALFFTIFDETKSWYFTENMERNCRAPCNIQMEDPTFKENYRFHAINGYIMDTLPGLVMAQDQRIRWYLLSMGSNENIHSIHFSGHVFTVRKKEEYKMALYNLYPGVFETVEMLPSKAGIWRVECLIGEHLHAGMSTLFLVYSNKCQTPLGMASGHIRDFQITASGQYGQWAPKLARLHYSGSINAWSTKEPFSWIKVDLLAPMIIHGIKTQGARQKFSSLYISQFIIMYSLDGKKWQTYRGNSTGTLMVFFGNVDSSGIKHNIFNPPIIARYIRLHPTHYSIRSTLRMELMGCDLNSCSMPLGMESKAISDAQITASSYFTNMFATWSPSKARLHLQGRSNAWRPQVNNPKEWLQVDFQKTMKVTGVTTQGVKSLLTSMYVKEFLISSSQDGHQWTLFFQNGKVKVFQGNQDSFTPVVNSLDPPLLTRYLRIHPQSWVHQIALRMEVLGCEAQDLYGAPGTSESATPESGPGSEPATSGSETPGTSESATPESGPGSEPATSGSETPGTSESATPESGPGTSTEPSEGSAPGSPAGSPTSTEEGTSESATPESGPGSEPATSGSETPGTSESATPESGPGSPAGSPTSTEEGSPAGSPTSTEEGTSTEPSEGSAPGTSESATPESGPGTSESATPESGPGTSESATPESGPGSEPATSGSETPGSEPATSGSETPGSPAGSPTSTEEGTSTEPSEGSAPGTSTEPSEGSAPGSEPATSGSETPGTSESATPESGPGTSTEPSEGSAPASSEQKLISEEDLSPATGHHHHHH

SEQ ID NO: 1102 - DNA, 6171 bp, synthetic construct
  misc_feature 1..6171: note = Description of Artificial Sequence: Synthetic polynucleotide
  source 1..6171: mol_type = other DNA
gccaccagaagatactacctgggtgcagtggaactgtcatgggactatatgcaaagtgatctcggtgagctgcctgtggacgcaagatttcctcctagagtgccaaaatcttttccattcaacacctcagtcgtgtacaaaaagactctgtttgtagaattcacggatcaccttttcaacatcgctaagccaaggccaccctggatgggtctgctaggtcctaccatccaggctgaggtttatgatacagtggtcattacacttaagaacatggcttcccatcctgtcagtcttcatgctgttggtgtatcctactggaaagcttctgagggagctgaatatgatgatcagaccagtcaaagggagaaagaagatgataaagtcttccctggtggaagccatacatatgtctggcaggtcctgaaagagaatggtccaatggcctctgacccactgtgccttacctactcatatctttctcatgtggacctggtaaaagacttgaattcaggcctcattggagccctactagtatgtagagaagggagtctggccaaggaaaagacacagaccttgcacaaatttatactactttttgctgtatttgatgaagggaaaagttggcactcagaaacaaagaactccttgatgcaggatagggatgctgcatctgctcgggcctggcctaaaatgcacacagtcaatggttatgtaaacaggtctctgccaggtctgattggatgccacaggaaatcagtctattggcatgtgattggaatgggcaccactcctgaagtgcactcaatattcctcgaaggtcacacatttcttgtgaggaaccatcgccaggctagcttggaaatctcgccaataactttccttactgctcaaacactcttgatggaccttggacagtttctactgttttgtcatatctcttcccaccaacatgatggcatggaagcttatgtcaaagtagacagctgtccagaggaaccccaactacgaatgaaaaataatgaagaagcggaagactatgatgatgatcttactgattctgaaatggatgtggtcaggtttgatgatgacaactctccttcctttatccaaattcgctcagttgccaagaagcatcctaaaacttgggtacattacattgctgctgaagaggaggactgggactatgctcccttagtcctcgcccccgatgacagaagttataaaagtcaatatttgaacaatggccctcagcggattggtaggaagtacaaaaaagtccgatttatggcatacacagatgaaacctttaagactcgtgaagctattcagcatgaatcaggaatcttgggacctttactttatggggaagttggagacacactgttgattatatttaagaatcaagcaagcagaccatataacatctaccctcacggaatcactgatgtccgtcctttgtattcaaggagattaccaaaaggtgtaaaacatttgaaggattttccaattctgccaggagaaatattcaaatataaatggacagtgactgtagaagatgggccaactaaatcagatcctcggtgcctgacccgctattactctagtttcgttaatatggagagagatctagcttcaggactcattggccctctcctcatctgctacaaagaatctgtagatcaaagaggaaaccagataatgtcagacaagaggaatgtcatcctgttttctgtatttgatgagaaccgaagctggtacctcacagagaatatacaacgctttctccccaatccagctggagtgcagcttgaggatccagagttccaagcctccaacatcatgcacagcatcaatggctatgtttttgatagtttgcagttgtcagtttgtttgcatgaggtggcatactggtacattctaagcattggagcacagactgacttcctttctgtcttcttctctggatataccttcaaacacaaaatggtctatgaagacacactcaccctattcccattctcaggagaaactgtcttcatgtcgatggaaaacccaggtctatggattctggggtgccacaactcagactttcggaacagaggcatgaccgccttactgaaggtttctagttgtgacaagaacactggtgattattacgaggacagttatgaagatatttcagcatacttgctgagtaaaaacaatgccattgaaccaagaagcttctctcaaaacggcgcgccaagtcccgctggaagcccaactagcaccgaagaggggacctcagagtccgccacccccgagtccggccctggctctgagcctgccactagcggctccgagactcctggcacatccgaaagcgctacacccgagagtggacccggcacctctaccgagcccagtgagggctccgcccctggaacaagcaccgagcccagcgaaggcagcgccccagggacctccacagagcccagtgaaggcagtgctcctggcaccagcaccgaaccaagcgagggctctgcacccgggacctccaccgagccaagcgaaggctctgcccctggcacttccaccgagcccagcgaaggcagcgcccctgggagccccgctggctctcccaccagcactgaggagggcacatctaccgaaccaagtgaaggctctgcaccaggtgcctcgagcccaccagtcttgaaacgccatcaagctgaaataactcgtactactcttcagtcagatcaagaggaaatcgattatgatgataccatatcagttgaaatgaagaaggaagattttgacatttatgatgaggatgaaaatcagagcccccgcagctttcaaaagaaaacacgacactattttattgctgcagtggagaggctctgggattatgggatgagtagctccccacatgttctaagaaacagggctcagggcgcgccaggtacacccggatcgggtacagcgtcatcgagccccggtgcgtcacctggtacgtcgagcacggggtcgccaggggcgtcccctgggacgtcctcaacaggctcgcccggtgcgtcacccggcacgtcgtccacgggttcacctggtagctccccttccgcgtccactggcaccgggcctggaactccggggagcggcacagcgagctcgtcgccgggagcatcgcctgggacatcgagcaccgggtcgccaggagcatcgcccggaacatccagcacaggaagccccggcgcgtcgcccgggacatcaagcacaggttccccgggatcgagcacgccgtccggagccactggatcaccagggagctcgacaccttccggcgcaacgggatcgcccggagccagcccgggtacgtcaagcactggctcccctgcctcgagcagggctcagagtggcagtgtccctcagttcaagaaagttgttttccaggaatttactgatggctcctttactcagcccttataccgtggagaactaaatgaacatttgggactcctggggccatatataagagcagaagttgaagataatatcatggtaactttcagaaatcaggcctctcgtccctattccttctattctagccttatttcttatgaggaagatcagaggcaaggagcagaacctagaaaaaactttgtcaagcctaatgaaaccaaaacttacttttggaaagtgcaacatcatatggcacccactaaagatgagtttgactgcaaagcctgggcttatttctctgatgttgacctggaaaaagatgtgcactcaggcctgattggaccccttctggtctgccacactaacacactgaaccctgctcatgggagacaagtgacagtacaggaatttgctctgtttttcaccatctttgatgagaccaaaagctggtacttcactgaaaatatggaaagaaactgcagggctccctgcaatatccagatggaagatcccacttttaaagagaattatcgcttccatgcaatcaatggctacataatggatacactacctggcttagtaatggctcaggatcaaaggattcgatggtatctgctcagcatgggcagcaatgaaaacatccattctattcatttcagtggacatgtgttcactgtacgaaaaaaagaggagtataaaatggcactgtacaatctctatccaggtgtttttgagacagtggaaatgttaccatccaaagctggaatttggcgggtggaatgccttattggcgagcatctacatgctgggatgagcacactttttctggtgtacagcaataagtgtcagactcccctgggaatggcttctggacacattagagattttcagattacagcttcaggacaatatggacagtgggccccaaagctggccagacttcattattccggatcaatcaatgcctggagcaccaaggagcccttttcttggatcaaggtggatctgttggcaccaatgattattcacggcatcaagacccagggtgcccgtcagaagttctccagcctctacatctctcagtttatcatcatgtatagtcttgatgggaagaagtggcagacttatcgaggaaattccactggaaccttaatggtcttctttggcaatgtggattcatctgggataaaacacaatatttttaaccctccaattattgctcgatacatccgtttgcacccaactcattatagcattcgcagcactcttcgcatggagttgatgggctgtgatttaaatagttgcagcatgccattgggaatggagagtaaagcaatatcagatgcacagattactgcttcatcctactttaccaatatgtttgccacctggtctccttcaaaagctcgacttcacctccaagggaggagtaatgcctggagacctcaggtgaataatccaaaagagtggctgcaagtggacttccagaagacaatgaaagtcacaggagtaactactcagggagtaaaatctctgcttaccagcatgtatgtgaaggagttcctcatctccagcagtcaagatggccatcagtggactctcttttttcagaatggcaaagtaaaggtttttcagggaaatcaagactccttcacacctgtggtgaactctctagacccaccgttactgactcgctaccttcgaattcacccccagagttgggtgcaccagattgccctgaggatggaggttctgggctgcgaggcacaggacctctacggcgcgccaggtacctcagagtctgctacccccgagtcagggccaggatcagagccagccacctccgggtctgagacacccgggacttccgagagtgccacccctgagtccggacccgggtccgagcccgccacttccggctccgaaactcccggcacaagcgagagcgctaccccagagtcaggaccaggaacatctacagagccctctgaaggctccgctccagggtccccagccggcagtcccactagcaccgaggagggaacctctgaaagcgccacacccgaatcagggccagggtctgagcctgctaccagcggcagcgagacaccaggcacctctgagtccgccacaccagagtccggacccggatctcccgctgggagccccacctccactgaggagggatctcctgctggctctccaacatctactgaggaaggtacctcaaccgagccatccgagggatcagctcccggcacctcagagtcggcaaccccggagtctggacccggaacttccgaaagtgccacaccagagtccggtcccgggacttcagaatcagcaacacccgagtccggccctgggtctgaacccgccacaagtggtagtgagacaccaggatcagaacctgctacctcagggtcagagacacccggatctccggcaggctcaccaacctccactgaggagggcaccagcacagaaccaagcgagggctccgcacccggaacaagcactgaacccagtgagggttcagcacccggctctgagccggccacaagtggcagtgagacacccggcacttcagagagtgccacccccgagagtggcccaggcactagtaccgagccctctgaaggcagtgcgccagcctcgagcgaacaaaaactcatctcagaagaggatctgtcacctgcaaccggtcatcatcaccatcaccattga

SEQ ID NO: 1103 - protein, 2053 aa, synthetic construct
  REGION 1..2053: note = Description of Artificial Sequence: Synthetic polypeptide
ATRRYYLGAVELSWDYMQSDLGELPVDARFPPRVPKSFPFNTSVVYKKTLFVEFTDHLFNIAKPRPPWMGLLGPTIQAEVYDTVVITLKNMASHPVSLHAVGVSYWKASEGAEYDDQTSQREKEDDKVFPGGSHTYVWQVLKENGPMASDPLCLTYSYLSHVDLVKDLNSGLIGALLVCREGSLAKEKTQTLHKFILLFAVFDEGKSWHSETKNSLMQDRDAASARAWPKMHTVNGYVNRSLPGLIGCHRKSVYWHVIGMGTTPEVHSIFLEGHTFLVRNHRQASLEISPITFLTAQTLLMDLGQFLLFCHISSHQHDGMEAYVKVDSCPEEPQLRMKNNEEAEDYDDDLTDSEMDVVRFDDDNSPSFIQIRSVAKKHPKTWVHYIAAEEEDWDYAPLVLAPDDRSYKSQYLNNGPQRIGRKYKKVRFMAYTDETFKTREAIQHESGILGPLLYGEVGDTLLIIFKNQASRPYNIYPHGITDVRPLYSRRLPKGVKHLKDFPILPGEIFKYKWTVTVEDGPTKSDPRCLTRYYSSFVNMERDLASGLIGPLLICYKESVDQRGNQIMSDKRNVILFSVFDENRSWYLTENIQRFLPNPAGVQLEDPEFQASNIMHSINGYVFDSLQLSVCLHEVAYWYILSIGAQTDFLSVFFSGYTFKHKMVYEDTLTLFPFSGETVFMSMENPGLWILGCHNSDFRNRGMTALLKVSSCDKNTGDYYEDSYEDISAYLLSKNNAIEPRSFSQNGAPSPAGSPTSTEEGTSESATPESGPGSEPATSGSETPGTSESATPESGPGTSTEPSEGSAPGTSTEPSEGSAPGTSTEPSEGSAPGTSTEPSEGSAPGTSTEPSEGSAPGTSTEPSEGSAPGSPAGSPTSTEEGTSTEPSEGSAPGASSPPVLKRHQAEITRTTLQSDQEEIDYDDTISVEMKKEDFDIYDEDENQSPRSFQKKTRHYFIAAVERLWDYGMGAPTSESATPESGPGSEPATSGSETPGTSESATPESGPGSEPATSGSETPGTSESATPESGPGTSTEPSEGSAPGTSESATPESGPGSPAGSPTSTEEGSPAGSPTSTEEGSPAGSPTSTEEGTSESATPESGPGTSTEPSEGSAPGASSSSSPHVLRNRAQSGSVPQFKKVVFQEFTDGSFTQPLYRGELNEHLGLLGPYIRAEVEDNIMVTFRNQASRPYSFYSSLISYEEDQRQGAEPRKNFVKPNETKTYFWKVQHHMAPTKDEFDCKAWAYFSDVDLEKDVHSGLIGPLLVCHTNTLNPAHGRQVTVQEFALFFTIFDETKSWYFTENMERNCRAPCNIQMEDPTFKENYRFHAINGYIMDTLPGLVMAQDQRIRWYLLSMGSNENIHSIHFSGHVFTVRKKEEYKMALYNLYPGVFETVEMLPSKAGIWRVECLIGEHLHAGMSTLFLVYSNKCQTPLGMASGHIRDFQITASGQYGQWAPKLARLHYSGSINAWSTKEPFSWIKVDLLAPMIIHGIKTQGARQKFSSLYISQFIIMYSLDGKKWQTYRGNSTGTLMVFFGNVDSSGIKHNIFNPPIIARYIRLHPTHYSIRSTLRMELMGCDLNSCSMPLGMESKAISDAQITASSYFTNMFATWSPSKARLHLQGRSNAWRPQVNNPKEWLQVDFQKTMKVTGVTTQGVKSLLTSMYVKEFLISSSQDGHQWTLFFQNGKVKVFQGNQDSFTPVVNSLDPPLLTRYLRIHPQSWVHQIALRMEVLGCEAQDLYGAPGTSESATPESGPGSEPATSGSETPGTSESATPESGPGSEPATSGSETPGTSESATPESGPGTSTEPSEGSAPGSPAGSPTSTEEGTSESATPESGPGSEPATSGSETPGTSESATPESGPGSPAGSPTSTEEGSPAGSPTSTEEGTSTEPSEGSAPGTSESATPESGPGTSESATPESGPGTSESATPESGPGSEPATSGSETPGSEPATSGSETPGSPAGSPTSTEEGTSTEPSEGSAPGTSTEPSEGSAPGSEPATSGSETPGTSESATPESGPGTSTEPSEGSAPASSEQKLISEEDLSPATGHHHHHH

SEQ ID NO: 1104 - DNA, 6162 bp, synthetic construct
  misc_feature 1..6162: note = Description of Artificial Sequence: Synthetic polynucleotide
  source 1..6162: mol_type = other DNA
gccaccagaagatactacctgggtgcagtggaactgtcatgggactatatgcaaagtgatctcggtgagctgcctgtggacgcaagatttcctcctagagtgccaaaatcttttccattcaacacctcagtcgtgtacaaaaagactctgtttgtagaattcacggatcaccttttcaacatcgctaagccaaggccaccctggatgggtctgctaggtcctaccatccaggctgaggtttatgatacagtggtcattacacttaagaacatggcttcccatcctgtcagtcttcatgctgttggtgtatcctactggaaagcttctgagggagctgaatatgatgatcagaccagtcaaagggagaaagaagatgataaagtcttccctggtggaagccatacatatgtctggcaggtcctgaaagagaatggtccaatggcctctgacccactgtgccttacctactcatatctttctcatgtggacctggtaaaagacttgaattcaggcctcattggagccctactagtatgtagagaagggagtctggccaaggaaaagacacagaccttgcacaaatttatactactttttgctgtatttgatgaagggaaaagttggcactcagaaacaaagaactccttgatgcaggatagggatgctgcatctgctcgggcctggcctaaaatgcacacagtcaatggttatgtaaacaggtctctgccaggtctgattggatgccacaggaaatcagtctattggcatgtgattggaatgggcaccactcctgaagtgcactcaatattcctcgaaggtcacacatttcttgtgaggaaccatcgccaggctagcttggaaatctcgccaataactttccttactgctcaaacactcttgatggaccttggacagtttctactgttttgtcatatctcttcccaccaacatgatggcatggaagcttatgtcaaagtagacagctgtccagaggaaccccaactacgaatgaaaaataatgaagaagcggaagactatgatgatgatcttactgattctgaaatggatgtggtcaggtttgatgatgacaactctccttcctttatccaaattcgctcagttgccaagaagcatcctaaaacttgggtacattacattgctgctgaagaggaggactgggactatgctcccttagtcctcgcccccgatgacagaagttataaaagtcaatatttgaacaatggccctcagcggattggtaggaagtacaaaaaagtccgatttatggcatacacagatgaaacctttaagactcgtgaagctattcagcatgaatcaggaatcttgggacctttactttatggggaagttggagacacactgttgattatatttaagaatcaagcaagcagaccatataacatctaccctcacggaatcactgatgtccgtcctttgtattcaaggagattaccaaaaggtgtaaaacatttgaaggattttccaattctgccaggagaaatattcaaatataaatggacagtgactgtagaagatgggccaactaaatcagatcctcggtgcctgacccgctattactctagtttcgttaatatggagagagatctagcttcaggactcattggccctctcctcatctgctacaaagaatctgtagatcaaagaggaaaccagataatgtcagacaagaggaatgtcatcctgttttctgtatttgatgagaaccgaagctggtacctcacagagaatatacaacgctttctccccaatccagctggagtgcagcttgaggatccagagttccaagcctccaacatcatgcacagcatcaatggctatgtttttgatagtttgcagttgtcagtttgtttgcatgaggtggcatactggtacattctaagcattggagcacagactgacttcctttctgtcttcttctctggatataccttcaaacacaaaatggtctatgaagacacactcaccctattcccattctcaggagaaactgtcttcatgtcgatggaaaacccaggtctatggattctggggtgccacaactcagactttcggaacagaggcatgaccgccttactgaaggtttctagttgtgacaagaacactggtgattattacgaggacagttatgaagatatttcagcatacttgctgagtaaaaacaatgccattgaaccaagaagcttctctcaaaacggcgcgccaagtcccgctggaagcccaactagcaccgaagaggggacctcagagtccgccacccccgagtccggccctggctctgagcctgccactagcggctccgagactcctggcacatccgaaagcgctacacccgagagtggacccggcacctctaccgagcccagtgagggctccgcccctggaacaagcaccgagcccagcgaaggcagcgccccagggacctccacagagcccagtgaaggcagtgctcctggcaccagcaccgaaccaagcgagggctctgcacccgggacctccaccgagccaagcgaaggctctgcccctggcacttccaccgagcccagcgaaggcagcgcccctgggagccccgctggctctcccaccagcactgaggagggcacatctaccgaaccaagtgaaggctctgcaccaggtgcctcgagcccaccagtcttgaaacgccatcaagctgaaataactcgtactactcttcagtcagatcaagaggaaatcgattatgatgataccatatcagttgaaatgaagaaggaagattttgacatttatgatgaggatgaaaatcagagcccccgcagctttcaaaagaaaacacgacactattttattgctgcagtggagaggctctgggattatgggatgggcgcgccaacgtccgaaagtgctacccctgagtcaggccctggtagtgagcctgccacaagcggaagcgaaactccggggacctcagagtctgccactcccgaatcggggccaggctctgaaccggccacttcagggagcgaaacaccaggaacatcggagagcgctaccccggagagcgggccaggaactagtactgagcctagcgagggaagtgcacctggtacaagcgagtccgccacacccgagtctggccctggctctccagcgggctcacccacgagcactgaagagggctctcccgctggcagcccaacgtcgacagaagaaggatcaccagcaggctcccccacatcaacagaggagggtacatcagaatctgctactcccgagagtggacccggtacctccactgagcccagcgaggggagtgcaccaggtgcctcgagcagtagctccccacatgttctaagaaacagggctcagagtggcagtgtccctcagttcaagaaagttgttttccaggaatttactgatggctcctttactcagcccttataccgtggagaactaaatgaacatttgggactcctggggccatatataagagcagaagttgaagataatatcatggtaactttcagaaatcaggcctctcgtccctattccttctattctagccttatttcttatgaggaagatcagaggcaaggagcagaacctagaaaaaactttgtcaagcctaatgaaaccaaaacttacttttggaaagtgcaacatcatatggcacccactaaagatgagtttgactgcaaagcctgggcttatttctctgatgttgacctggaaaaagatgtgcactcaggcctgattggaccccttctggtctgccacactaacacactgaaccctgctcatgggagacaagtgacagtacaggaatttgctctgtttttcaccatctttgatgagaccaaaagctggtacttcactgaaaatatggaaagaaactgcagggctccctgcaatatccagatggaagatcccacttttaaagagaattatcgcttccatgcaatcaatggctacataatggatacactacctggcttagtaatggctcaggatcaaaggattcgatggtatctgctcagcatgggcagcaatgaaaacatccattctattcatttcagtggacatgtgttcactgtacgaaaaaaagaggagtataaaatggcactgtacaatctctatccaggtgtttttgagacagtggaaatgttaccatccaaagctggaatttggcgggtggaatgccttattggcgagcatctacatgctgggatgagcacactttttctggtgtacagcaataagtgtcagactcccctgggaatggcttctggacacattagagattttcagattacagcttcaggacaatatggacagtgggccccaaagctggccagacttcattattccggatcaatcaatgcctggagcaccaaggagcccttttcttggatcaaggtggatctgttggcaccaatgattattcacggcatcaagacccagggtgcccgtcagaagttctccagcctctacatctctcagtttatcatcatgtatagtcttgatgggaagaagtggcagacttatcgaggaaattccactggaaccttaatggtcttctttggcaatgtggattcatctgggataaaacacaatatttttaaccctccaattattgctcgatacatccgtttgcacccaactcattatagcattcgcagcactcttcgcatggagttgatgggctgtgatttaaatagttgcagcatgccattgggaatggagagtaaagcaatatcagatgcacagattactgcttcatcctactttaccaatatgtttgccacctggtctccttcaaaagctcgacttcacctccaagggaggagtaatgcctggagacctcaggtgaataatccaaaagagtggctgcaagtggacttccagaagacaatgaaagtcacaggagtaactactcagggagtaaaatctctgcttaccagcatgtatgtgaaggagttcctcatctccagcagtcaagatggccatcagtggactctcttttttcagaatggcaaagtaaaggtttttcagggaaatcaagactccttcacacctgtggtgaactctctagacccaccgttactgactcgctaccttcgaattcacccccagagttgggtgcaccagattgccctgaggatggaggttctgggctgcgaggcacaggacctctacggcgcgccaggtacctcagagtctgctacccccgagtcagggccaggatcagagccagccacctccgggtctgagacacccgggacttccgagagtgccacccctgagtccggacccgggtccgagcccgccacttccggctccgaaactcccggcacaagcgagagcgctaccccagagtcaggaccaggaacatctacagagccctctgaaggctccgctccagggtccccagccggcagtcccactagcaccgaggagggaacctctgaaagcgccacacccgaatcagggccagggtctgagcctgctaccagcggcagcgagacaccaggcacctctgagtccgccacaccagagtccggacccggatctcccgctgggagccccacctccactgaggagggatctcctgctggctctccaacatctactgaggaaggtacctcaaccgagccatccgagggatcagctcccggcacctcagagtcggcaaccccggagtctggacccggaacttccgaaagtgccacaccagagtccggtcccgggacttcagaatcagcaacacccgagtccggccctgggtctgaacccgccacaagtggtagtgagacaccaggatcagaacctgctacctcagggtcagagacacccggatctccggcaggctcaccaacctccactgaggagggcaccagcacagaaccaagcgagggctccgcacccggaacaagcactgaacccagtgagggttcagcacccggctctgagccggccacaagtggcagtgagacacccggcacttcagagagtgccacccccgagagtggcccaggcactagtaccgagccctctgaaggcagtgcgccagcctcgagcgaacaaaaactcatctcagaagaggatctgtcacctgcaaccggtcatcatcaccatcaccattga

SEQ ID NO: 1105 - protein, 2056 aa, synthetic construct
  REGION 1..2056: note = Description of Artificial Sequence: Synthetic polypeptide
ATRRYYLGAVELSWDYMQSDLGELPVDARFPPRVPKSFPFNTSVVYKKTLFVEFTDHLFNIAKPRPPWMGLLGPTIQAEVYDTVVITLKNMASHPVSLHAVGVSYWKASEGAEYDDQTSQREKEDDKVFPGGSHTYVWQVLKENGPMASDPLCLTYSYLSHVDLVKDLNSGLIGALLVCREGSLAKEKTQTLHKFILLFAVFDEGKSWHSETKNSLMQDRDAASARAWPKMHTVNGYVNRSLPGLIGCHRKSVYWHVIGMGTTPEVHSIFLEGHTFLVRNHRQASLEISPITFLTAQTLLMDLGQFLLFCHISSHQHDGMEAYVKVDSCPEEPQLRMKNNEEAEDYDDDLTDSEMDVVRFDDDNSPSFIQIRSVAKKHPKTWVHYIAAEEEDWDYAPLVLAPDDRSYKSQYLNNGPQRIGRKYKKVRFMAYTDETFKTREAIQHESGILGPLLYGEVGDTLLIIFKNQASRPYNIYPHGITDVRPLYSRRLPKGVKHLKDFPILPGEIFKYKWTVTVEDGPTKSDPRCLTRYYSSFVNMERDLASGLIGPLLICYKESVDQRGNQIMSDKRNVILFSVFDENRSWYLTENIQRFLPNPAGVQLEDPEFQASNIMHSINGYVFDSLQLSVCLHEVAYWYILSIGAQTDFLSVFFSGYTFKHKMVYEDTLTLFPFSGETVFMSMENPGLWILGCHNSDFRNRGMTALLKVSSCDKNTGDYYEDSYEDISAYLLSKNNAIEPRSFSQNGAPSPAGSPTSTEEGTSESATPESGPGSEPATSGSETPGTSESATPESGPGTSTEPSEGSAPGTSTEPSEGSAPGTSTEPSEGSAPGTSTEPSEGSAPGTSTEPSEGSAPGTSTEPSEGSAPGSPAGSPTSTEEGTSTEPSEGSAPGASSPPVLKRHQREITRTTLQSDQEEIDYDDTISVEMKKEDFDIYDEDENQSPRSFQKKTRHYFIAAVERLWDYGMSSSPHVLRNRAQGAPGTPGSGTASSSPGASPGTSSTGSPGASPGTSSTGSPGASPGTSSTGSPGSSPSASTGTGPGTPGSGTASSSPGASPGTSSTGSPGASPGTSSTGSPGASPGTSSTGSPGSSTPSGATGSPGSSTPSGATGSPGASPGTSSTGSPASSRAQSGSVPQFKKVVFQEFTDGSFTQPLYRGELNEHLGLLGPYIRAEVEDNIMVTFRNQASRPYSFYSSLISYEEDQRQGAEPRKNFVKPNETKTYFWKVQHHMAPTKDEFDCKAWAYFSDVDLEKDVHSGLIGPLLVCHTNTLNPAHGRQVTVQEFALFFTIFDETKSWYFTENMERNCRAPCNIQMEDPTFKENYRFHAINGYIMDTLPGLVMAQDQRIRWYLLSMGSNENIHSIHFSGHVFTVRKKEEYKMALYNLYPGVFETVEMLPSKAGIWRVECLIGEHLHAGMSTLFLVYSNKCQTPLGMASGHIRDFQITASGQYGQWAPKLARLHYSGSINAWSTKEPFSWIKVDLLAPMIIHGIKTQGARQKFSSLYISQFIIMYSLDGKKWQTYRGNSTGTLMVFFGNVDSSGIKHNIFNPPIIARYIRLHPTHYSIRSTLRMELMGCDLNSCSMPLGMESKAISDAQITASSYFTNMFATWSPSKARLHLQGRSNAWRPQVNNPKEWLQVDFQKTMKVTGVTTQGVKSLLTSMYVKEFLISSSQDGHQWTLFFQNGKVKVFQGNQDSFTPVVNSLDPPLLTRYLRIHPQSWVHQIALRMEVLGCEAQDLYGAPGTSESATPESGPGSEPATSGSETPGTSESATPESGPGSEPATSGSETPGTSESATPESGPGTSTEPSEGSAPGSPAGSPTSTEEGTSESATPESGPGSEPATSGSETPGTSESATPESGPGSPAGSPTSTEEGSPAGSPTSTEEGTSTEPSEGSAPGTSESATPESGPGTSESATPESGPGTSESATPESGPGSEPATSGSETPGSEPATSGSETPGSPAGSPTSTEEGTSTEPSEGSAPGTSTEPSEGSAPGSEPATSGSETPGTSESATPESGPGTSTEPSEGSAPASSEQKLISEEDLSPATGHHHHHH

SEQ ID NO: 1106 - DNA, 6171 bp, synthetic construct
  misc_feature 1..6171: note = Description of Artificial Sequence: Synthetic polynucleotide
  source 1..6171: mol_type = other DNA
gccaccagaagatactacctgggtgcagtggaactgtcatgggactatatgcaaagtgatctcggtgagctgcctgtggacgcaagatttcctcctagagtgccaaaatcttttccattcaacacctcagtcgtgtacaaaaagactctgtttgtagaattcacggatcaccttttcaacatcgctaagccaaggccaccctggatgggtctgctaggtcctaccatccaggctgaggtttatgatacagtggtcattacacttaagaacatggcttcccatcctgtcagtcttcatgctgttggtgtatcctactggaaagcttctgagggagctgaatatgatgatcagaccagtcaaagggagaaagaagatgataaagtcttccctggtggaagccatacatatgtctggcaggtcctgaaagagaatggtccaatggcctctgacccactgtgccttacctactcatatctttctcatgtggacctggtaaaagacttgaattcaggcctcattggagccctactagtatgtagagaagggagtctggccaaggaaaagacacagaccttgcacaaatttatactactttttgctgtatttgatgaagggaaaagttggcactcagaaacaaagaactccttgatgcaggatagggatgctgcatctgctcgggcctggcctaaaatgcacacagtcaatggttatgtaaacaggtctctgccaggtctgattggatgccacaggaaatcagtctattggcatgtgattggaatgggcaccactcctgaagtgcactcaatattcctcgaaggtcacacatttcttgtgaggaaccatcgccaggctagcttggaaatctcgccaataactttccttactgctcaaacactcttgatggaccttggacagtttctactgttttgtcatatctcttcccaccaacatgatggcatggaagcttatgtcaaagtagacagctgtccagaggaaccccaactacgaatgaaaaataatgaagaagcggaagactatgatgatgatcttactgattctgaaatggatgtggtcaggtttgatgatgacaactctccttcctttatccaaattcgctcagttgccaagaagcatcctaaaacttgggtacattacattgctgctgaagaggaggactgggactatgctcccttagtcctcgcccccgatgacagaagttataaaagtcaatatttgaacaatggccctcagcggattggtaggaagtacaaaaaagtccgatttatggcatacacagatgaaacctttaagactcgtgaagctattcagcatgaatcaggaatcttgggacctttactttatggggaagttggagacacactgttgattatatttaagaatcaagcaagcagaccatataacatctaccctcacggaatcactgatgtccgtcctttgtattcaaggagattaccaaaaggtgtaaaacatttgaaggattttccaattctgccaggagaaatattcaaatataaatggacagtgactgtagaagatgggccaactaaatcagatcctcggtgcctgacccgctattactctagtttcgttaatatggagagagatctagcttcaggactcattggccctctcctcatctgctacaaagaatctgtagatcaaagaggaaaccagataatgtcagacaagaggaatgtcatcctgttttctgtatttgatgagaaccgaagctggtacctcacagagaatatacaacgctttctccccaatccagctggagtgcagcttgaggatccagagttccaagcctccaacatcatgcacagcatcaatggctatgtttttgatagtttgcagttgtcagtttgtttgcatgaggtggcatactggtacattctaagcattggagcacagactgacttcctttctgtcttcttctctggatataccttcaaacacaaaatggtctatgaagacacactcaccctattcccattctcaggagaaactgtcttcatgtcgatggaaaacccaggtctatggattctggggtgccacaactcagactttcggaacagaggcatgaccgccttactgaaggtttctagttgtgacaagaacactggtgattattacgaggacagttatgaagatatttcagcatacttgctgagtaaaaacaatgccattgaaccaagaagcttctctcaaaacggcgcgccaagtcccgctggaagcccaactagcaccgaagaggggacctcagagtccgccacccccgagtccggccctggctctgagcctgccactagcggctccgagactcctggcacatccgaaagcgctacacccgagagtggacccggcacctctaccgagcccagtgagggctccgcccctggaacaagcaccgagcccagcgaaggcagcgccccagggacctccacagagcccagtgaaggcagtgctcctggcaccagcaccgaaccaagcgagggctctgcacccgggacctccaccgagccaagcgaaggctctgcccctggcacttccaccgagcccagcgaaggcagcgcccctgggagccccgctggctctcccaccagcactgaggagggcacatctaccgaaccaagtgaaggctctgcaccaggtgcctcgagcccaccagtcttgaaacgccatcaacgggaaataactcgtactactcttcagtcagatcaagaggaaatcgattatgatgataccatatcagttgaaatgaagaaggaagattttgacatttatgatgaggatgaaaatcagagcccccgcagctttcaaaagaaaacacgacactattttattgctgcagtggagaggctctgggattatgggatgagtagctccccacatgttctaagaaacagggctcagggcgcgccaggtacacccggatcgggtacagcgtcatcgagccccggtgcgtcacctggtacgtcgagcacggggtcgccaggggcgtcccctgggacgtcctcaacaggctcgcccggtgcgtcacccggcacgtcgtccacgggttcacctggtagctccccttccgcgtccactggcaccgggcctggaactccggggagcggcacagcgagctcgtcgccgggagcatcgcctgggacatcgagcaccgggtcgccaggagcatcgcccggaacatccagcacaggaagccccggcgcgtcgcccgggacatcaagcacaggttccccgggatcgagcacgccgtccggagccactggatcaccagggagctcgacaccttccggcgcaacgggatcgcccggagccagcccgggtacgtcaagcactggctcccctgcctcgagcagggctcagagtggcagtgtccctcagttcaagaaagttgttttccaggaatttactgatggctcctttactcagcccttataccgtggagaactaaatgaacatttgggactcctggggccatatataagagcagaagttgaagataatatcatggtaactttcagaaatcaggcctctcgtccctattccttctattctagccttatttcttatgaggaagatcagaggcaaggagcagaacctagaaaaaactttgtcaagcctaatgaaaccaaaacttacttttggaaagtgcaacatcatatggcacccactaaagatgagtttgactgcaaagcctgggcttatttctctgatgttgacctggaaaaagatgtgcactcaggcctgattggaccccttctggtctgccacactaacacactgaaccctgctcatgggagacaagtgacagtacaggaatttgctctgtttttcaccatctttgatgagaccaaaagctggtacttcactgaaaatatggaaagaaactgcagggctccctgcaatatccagatggaagatcccacttttaaagagaattatcgcttccatgcaatcaatggctacataatggatacactacctggcttagtaatggctcaggatcaaaggattcgatggtatctgctcagcatgggcagcaatgaaaacatccattctattcatttcagtggacatgtgttcactgtacgaaaaaaagaggagtataaaatggcactgtacaatctctatccaggtgtttttgagacagtggaaatgttaccatccaaagctggaatttggcgggtggaatgccttattggcgagcatctacatgctgggatgagcacactttttctggtgtacagcaataagtgtcagactcccctgggaatggcttctggacacattagagattttcagattacagcttcaggacaatatggacagtgggccccaaagctggccagacttcattattccggatcaatcaatgcctggagcaccaaggagcccttttcttggatcaaggtggatctgttggcaccaatgattattcacggcatcaagacccagggtgcccgtcagaagttctccagcctctacatctctcagtttatcatcatgtatagtcttgatgggaagaagtggcagacttatcgaggaaattccactggaaccttaatggtcttctttggcaatgtggattcatctgggataaaacacaatatttttaaccctccaattattgctcgatacatccgtttgcacccaactcattatagcattcgcagcactcttcgcatggagttgatgggctgtgatttaaatagttgcagcatgccattgggaatggagagtaaagcaatatcagatgcacagattactgcttcatcctactttaccaatatgtttgccacctggtctccttcaaaagctcgacttcacctccaagggaggagtaatgcctggagacctcaggtgaataatccaaaagagtggctgcaagtggacttccagaagacaatgaaagtcacaggagtaactactcagggagtaaaatctctgcttaccagcatgtatgtgaaggagttcctcatctccagcagtcaagatggccatcagtggactctcttttttcagaatggcaaagtaaaggtttttcagggaaatcaagactccttcacacctgtggtgaactctctagacccaccgttactgactcgctaccttcgaattcacccccagagttgggtgcaccagattgccctgaggatggaggttctgggctgcgaggcacaggacctctacggcgcgccaggtacctcagagtctgctacccccgagtcagggccaggatcagagccagccacctccgggtctgagacacccgggacttccgagagtgccacccctgagtccggacccgggtccgagcccgccacttccggctccgaaactcccggcacaagcgagagcgctaccccagagtcaggaccaggaacatctacagagccctctgaaggctccgctccagggtccccagccggcagtcccactagcaccgaggagggaacctctgaaagcgccacacccgaatcagggccagggtctgagcctgctaccagcggcagcgagacaccaggcacctctgagtccgccacaccagagtccggacccggatctcccgctgggagccccacctccactgaggagggatctcctgctggctctccaacatctactgaggaaggtacctcaaccgagccatccgagggatcagctcccggcacctcagagtcggcaaccccggagtctggacccggaacttccgaaagtgccacaccagagtccggtcccgggacttcagaatcagcaacacccgagtccggccctgggtctgaacccgccacaagtggtagtgagacaccaggatcagaacctgctacctcagggtcagagacacccggatctccggcaggctcaccaacctccactgaggagggcaccagcacagaaccaagcgagggctccgcacccggaacaagcactgaacccagtgagggttcagcacccggctctgagccggccacaagtggcagtgagacacccggcacttcagagagtgccacccccgagagtggcccaggcactagtaccgagccctctgaaggcagtgcgccagcctcgagcgaacaaaaactcatctcagaagaggatctgtcacctgcaaccggtcatcatcaccatcaccattga

SEQ ID NO: 1107 - protein, 2053 aa, synthetic construct
  REGION 1..2053: note = Description of Artificial Sequence: Synthetic polypeptide
ATRRYYLGAVELSWDYMQSDLGELPVDARFPPRVPKSFPFNTSVVYKKTLFVEFTDHLFNIAKPRPPWMGLLGPTIQAEVYDTVVITLKNMASHPVSLHAVGVSYWKASEGAEYDDQTSQREKEDDKVFPGGSHTYVWQVLKENGPMASDPLCLTYSYLSHVDLVKDLNSGLIGALLVCREGSLAKEKTQTLHKFILLFAVFDEGKSWHSETKNSLMQDRDAASARAWPKMHTVNGYVNRSLPGLIGCHRKSVYWHVIGMGTTPEVHSIFLEGHTFLVRNHRQASLEISPITFLTAQTLLMDLGQFLLFCHISSHQHDGMEAYVKVDSCPEEPQLRMKNNEEAEDYDDDLTDSEMDVVRFDDDNSPSFIQIRSVAKKHPKTWVHYIAAEEEDWDYAPLVLAPDDRSYKSQYLNNGPQRIGRKYKKVRFMAYTDETFKTREAIQHESGILGPLLYGEVGDTLLIIFKNQASRPYNIYPHGITDVRPLYSRRLPKGVKHLKDFPILPGEIFKYKWTVTVEDGPTKSDPRCLTRYYSSFVNMERDLASGLIGPLLICYKESVDQRGNQIMSDKRNVILFSVFDENRSWYLTENIQRFLPNPAGVQLEDPEFQASNIMHSINGYVFDSLQLSVCLHEVAYWYILSIGAQTDFLSVFFSGYTFKHKMVYEDTLTLFPFSGETVFMSMENPGLWILGCHNSDFRNRGMTALLKVSSCDKNTGDYYEDSYEDISAYLLSKNNAIEPRSFSQNGAPSPAGSPTSTEEGTSESATPESGPGSEPATSGSETPGTSESATPESGPGTSTEPSEGSAPGTSTEPSEGSAPGTSTEPSEGSAPGTSTEPSEGSAPGTSTEPSEGSAPGTSTEPSEGSAPGSPAGSPTSTEEGTSTEPSEGSAPGASSPPVLKRHQREITRTTLQSDQEEIDYDDTISVEMKKEDFDIYDEDENQSPRSFQKKTRHYFIAAVERLWDYGMGAPTSESATPESGPGSEPATSGSETPGTSESATPESGPGSEPATSGSETPGTSESATPESGPGTSTEPSEGSAPGTSESATPESGPGSPAGSPTSTEEGSPAGSPTSTEEGSPAGSPTSTEEGTSESATPESGPGTSTEPSEGSAPGASSSSSPHVLRNRAQSGSVPQFKKVVFQEFTDGSFTQPLYRGELNEHLGLLGPYIRAEVEDNIMVTFRNQASRPYSFYSSLISYEEDQRQGAEPRKNFVKPNETKTYFWKVQHHMAPTKDEFDCKAWAYFSDVDLEKDVHSGLIGPLLVCHTNTLNPAHGRQVTVQEFALFFTIFDETKSWYFTENMERNCRAPCNIQMEDPTFKENYRFHAINGYIMDTLPGLVMAQDQRIRWYLLSMGSNENIHSIHFSGHVFTVRKKEEYKMALYNLYPGVFETVEMLPSKAGIWRVECLIGEHLHAGMSTLFLVYSNKCQTPLGMASGHIRDFQITASGQYGQWAPKLARLHYSGSINAWSTKEPFSWIKVDLLAPMIIHGIKTQGARQKFSSLYISQFIIMYSLDGKKWQTYRGNSTGTLMVFFGNVDSSGIKHNIFNPPIIARYIRLHPTHYSIRSTLRMELMGCDLNSCSMPLGMESKAISDAQITASSYFTNMFATWSPSKARLHLQGRSNAWRPQVNNPKEWLQVDFQKTMKVTGVTTQGVKSLLTSMYVKEFLISSSQDGHQWTLFFQNGKVKVFQGNQDSFTPVVNSLDPPLLTRYLRIHPQSWVHQIALRMEVLGCEAQDLYGAPGTSESATPESGPGSEPATSGSETPGTSESATPESGPGSEPATSGSETPGTSESATPESGPGTSTEPSEGSAPGSPAGSPTSTEEGTSESATPESGPGSEPATSGSETPGTSESATPESGPGSPAGSPTSTEEGSPAGSPTSTEEGTSTEPSEGSAPGTSESATPESGPGTSESATPESGPGTSESATPESGPGSEPATSGSETPGSEPATSGSETPGSPAGSPTSTEEGTSTEPSEGSAPGTSTEPSEGSAPGSEPATSGSETPGTSESATPESGPGTSTEPSEGSAPASSEQKLISEEDLSPATGHHHHHH

SEQ ID NO: 1108 - DNA, 6162 bp, synthetic construct
  misc_feature 1..6162: note = Description of Artificial Sequence: Synthetic polynucleotide
  source 1..6162: mol_type = other DNA
gccaccagaagatactacctgggtgcagtggaactgtcatgggactatatgcaaagtgatctcggtgagctgcctgtggacgcaagatttcctcctagagtgccaaaatcttttccattcaacacctcagtcgtgtacaaaaagactctgtttgtagaattcacggatcaccttttcaacatcgctaagccaaggccaccctggatgggtctgctaggtcctaccatccaggctgaggtttatgatacagtggtcattacacttaagaacatggcttcccatcctgtcagtcttcatgctgttggtgtatcctactggaaagcttctgagggagctgaatatgatgatcagaccagtcaaagggagaaagaagatgataaagtcttccctggtggaagccatacatatgtctggcaggtcctgaaagagaatggtccaatggcctctgacccactgtgccttacctactcatatctttctcatgtggacctggtaaaagacttgaattcaggcctcattggagccctactagtatgtagagaagggagtctggccaaggaaaagacacagaccttgcacaaatttatactactttttgctgtatttgatgaagggaaaagttggcactcagaaacaaagaactccttgatgcaggatagggatgctgcatctgctcgggcctggcctaaaatgcacacagtcaatggttatgtaaacaggtctctgccaggtctgattggatgccacaggaaatcagtctattggcatgtgattggaatgggcaccactcctgaagtgcactcaatattcctcgaaggtcacacatttcttgtgaggaaccatcgccaggctagcttggaaatctcgccaataactttccttactgctcaaacactcttgatggaccttggacagtttctactgttttgtcatatctcttcccaccaacatgatggcatggaagcttatgtcaaagtagacagctgtccagaggaaccccaactacgaatgaaaaataatgaagaagcggaagactatgatgatgatcttactgattctgaaatggatgtggtcaggtttgatgatgacaactctccttcctttatccaaattcgctcagttgccaagaagcatcctaaaacttgggtacattacattgctgctgaagaggaggactgggactatgctcccttagtcctcgcccccgatgacagaagttataaaagtcaatatttgaacaatggccctcagcggattggtaggaagtacaaaaaagtccgatttatggcatacacagatgaaacctttaagactcgtgaagctattcagcatgaatcaggaatcttgggacctttactttatggggaagttggagacacactgttgattatatttaagaatcaagcaagcagaccatataacatctaccctcacggaatcactgatgtccgtcctttgtattcaaggagattaccaaaaggtgtaaaacatttgaaggattttccaattctgccaggagaaatattcaaatataaatggacagtgactgtagaagatgggccaactaaatcagatcctcggtgcctgacccgctattactctagtttcgttaatatggagagagatctagcttcaggactcattggccctctcctcatctgctacaaagaatctgtagatcaaagaggaaaccagataatgtcagacaagaggaatgtcatcctgttttctgtatttgatgagaaccgaagctggtacctcacagagaatatacaacgctttctccccaatccagctggagtgcagcttgaggatccagagttccaagcctccaacatcatgcacagcatcaatggctatgtttttgatagtttgcagttgtcagtttgtttgcatgaggtggcatactggtacattctaagcattggagcacagactgacttcctttctgtcttcttctctggatataccttcaaacacaaaatggtctatgaagacacactcaccctattcccattctcaggagaaactgtcttcatgtcgatggaaaacccaggtctatggattctggggtgccacaactcagactttcggaacagaggcatgaccgccttactgaaggtttctagttgtgacaagaacactggtgattattacgaggacagttatgaagatatttcagcatacttgctgagtaaaaacaatgccattgaaccaagaagcttctctcaaaacggcgcgccaagtcccgctggaagcccaactagcaccgaagaggggacctcagagtccgccacccccgagtccggccctggctctgagcctgccactagcggctccgagactcctggcacatccgaaagcgctacacccgagagtggacccggcacctctaccgagcccagtgagggctccgcccctggaacaagcaccgagcccagcgaaggcagcgccccagggacctccacagagcccagtgaaggcagtgctcctggcaccagcaccgaaccaagcgagggctctgcacccgggacctccaccgagccaagcgaaggctctgcccctggcacttccaccgagcccagcgaaggcagcgcccctgggagccccgctggctctcccaccagcactgaggagggcacatctaccgaaccaagtgaaggctctgcaccaggtgcctcgagcccaccagtcttgaaacgccatcaacgggaaataactcgtactactcttcagtcagatcaagaggaaatcgattatgatgataccatatcagttgaaatgaagaaggaagattttgacatttatgatgaggatgaaaatcagagcccccgcagctttcaaaagaaaacacgacactattttattgctgcagtggagaggctctgggattatgggatgggcgcgccaacgtccgaaagtgctacccctgagtcaggccctggtagtgagcctgccacaagcggaagcgaaactccggggacctcagagtctgccactcccgaatcggggccaggctctgaaccggccacttcagggagcgaaacaccaggaacatcggagagcgctaccccggagagcgggccaggaactagtactgagcctagcgagggaagtgcacctggtacaagcgagtccgccacacccgagtctggccctggctctccagcgggctcacccacgagcactgaagagggctctcccgctggcagcccaacgtcgacagaagaaggatcaccagcaggctcccccacatcaacagaggagggtacatcagaatctgctactcccgagagtggacccggtacctccactgagcccagcgaggggagtgcaccaggtgcctcgagcagtagctccccacatgttctaagaaacagggctcagagtggcagtgtccctcagttcaagaaagttgttttccaggaatttactgatggctcctttactcagcccttataccgtggagaactaaatgaacatttgggactcctggggccatatataagagcagaagttgaagataatatcatggtaactttcagaaatcaggcctctcgtccctattccttctattctagccttatttcttatgaggaagatcagaggcaaggagcagaacctagaaaaaactttgtcaagcctaatgaaaccaaaacttacttttggaaagtgcaacatcatatggcacccactaaagatgagtttgactgcaaagcctgggcttatttctctgatgttgacctggaaaaagatgtgcactcaggcctgattggaccccttctggtctgccacactaacacactgaaccctgctcatgggagacaagtgacagtacaggaatttgctctgtttttcaccatctttgatgagaccaaaagctggtacttcactgaaaatatggaaagaaactgcagggctccctgcaatatccagatggaagatcccacttttaaagagaattatcgcttccatgcaatcaatggctacataatggatacactacctggcttagtaatggctcaggatcaaaggattcgatggtatctgctcagcatgggcagcaatgaaaacatccattctattcatttcagtggacatgtgttcactgtacgaaaaaaagaggagtataaaatggcactgtacaatctctatccaggtgtttttgagacagtggaaatgttaccatccaaagctggaatttggcgggtggaatgccttattggcgagcatctacatgctgggatgagcacactttttctggtgtacagcaataagtgtcagactcccctgggaatggcttctggacacattagagattttcagattacagcttcaggacaatatggacagtgggccccaaagctggccagacttcattattccggatcaatcaatgcctggagcaccaaggagcccttttcttggatcaaggtggatctgttggcaccaatgattattcacggcatcaagacccagggtgcccgtcagaagttctccagcctctacatctctcagtttatcatcatgtatagtcttgatgggaagaagtggcagacttatcgaggaaattccactggaaccttaatggtcttctttggcaatgtggattcatctgggataaaacacaatatttttaaccctccaattattgctcgatacatccgtttgcacccaactcattatagcattcgcagcactcttcgcatggagttgatgggctgtgatttaaatagttgcagcatgccattgggaatggagagtaaagcaatatcagatgcacagattactgcttcatcctactttaccaatatgtttgccacctggtctccttcaaaagctcgacttcacctccaagggaggagtaatgcctggagacctcaggtgaataatccaaaagagtggctgcaagtggacttccagaagacaatgaaagtcacaggagtaactactcagggagtaaaatctctgcttaccagcatgtatgtgaaggagttcctcatctccagcagtcaagatggccatcagtggactctcttttttcagaatggcaaagtaaaggtttttcagggaaatcaagactccttcacacctgtggtgaactctctagacccaccgttactgactcgctaccttcgaattcacccccagagttgggtgcaccagattgccctgaggatggaggttctgggctgcgaggcacaggacctctacggcgcgccaggtacctcagagtctgctacccccgagtcagggccaggatcagagccagccacctccgggtctgagacacccgggacttccgagagtgccacccctgagtccggacccgggtccgagcccgccacttccggctccgaaactcccggcacaagcgagagcgctaccccagagtcaggaccaggaacatctacagagccctctgaaggctccgctccagggtccccagccggcagtcccactagcaccgaggagggaacctctgaaagcgccacacccgaatcagggccagggtctgagcctgctaccagcggcagcgagacaccaggcacctctgagtccgccacaccagagtccggacccggatctcccgctgggagccccacctccactgaggagggatctcctgctggctctccaacatctactgaggaaggtacctcaaccgagccatccgagggatcagctcccggcacctcagagtcggcaaccccggagtctggacccggaacttccgaaagtgccacaccagagtccggtcccgggacttcagaatcagcaacacccgagtccggccctgggtctgaacccgccacaagtggtagtgagacaccaggatcagaacctgctacctcagggtcagagacacccggatctccggcaggctcaccaacctccactgaggagggcaccagcacagaaccaagcgagggctccgcacccggaacaagcactgaacccagtgagggttcagcacccggctctgagccggccacaagtggcagtgagacacccggcacttcagagagtgccacccccgagagtggcccaggcactagtaccgagccctctgaaggcagtgcgccagcctcgagcgaacaaaaactcatctcagaagaggatctgtcacctgcaaccggtcatcatcaccatcaccattga

SEQ ID NO: 1109 - protein, 2053 aa, synthetic construct
  REGION 1..2053: note = Description of Artificial Sequence: Synthetic polypeptide
ATRRYYLGAVELSWDYMQSDLGELPVDARFPPRVPKSFPFNTSVVYKKTLFVEFTDHLFNIAKPRPPWMGLLGPTIQAEVYDTVVITLKNMASHPVSLHAVGVSYWKASEGAEYDDQTSQREKEDDKVFPGGSHTYVWQVLKENGPMASDPLCLTYSYLSHVDLVKDLNSGLIGALLVCREGSLAKEKTQTLHKFILLFAVFDEGKSWHSETKNSLMQDRDAASARAWPKMHTVNGYVNRSLPGLIGCHRKSVYWHVIGMGTTPEVHSIFLEGHTFLVRNHRQASLEISPITFLTAQTLLMDLGQFLLFCHISSHQHDGMEAYVKVDSCPEEPQLRMKNNEEAEDYDDDLTDSEMDVVRFDDDNSPSFIQIRSVAKKHPKTWVHYIAAEEEDWDYAPLVLAPDDRSYKSQYLNNGPQRIGRKYKKVRFMAYTDETFKTREAIQHESGILGPLLYGEVGDTLLIIFKNQASRPYNIYPHGITDVRPLYSRRLPKGVKHLKDFPILPGEIFKYKWTVTVEDGPTKSDPRCLTRYYSSFVNMERDLASGLIGPLLICYKESVDQRGNQIMSDKRNVILFSVFDENRSWYLTENIQRFLPNPAGVQLEDPEFQASNIMHSINGYVFDSLQLSVCLHEVAYWYILSIGAQTDFLSVFFSGYTFKHKMVYEDTLTLFPFSGETVFMSMENPGLWILGCHNSDFRNRGMTALLKVSSCDKNTGDYYEDSYEDISAYLLSKNNAIEPRSFSQNGAPSPAGSPTSTEEGTSESATPESGPGSEPATSGSETPGTSESATPESGPGTSTEPSEGSAPGTSTEPSEGSAPGTSTEPSEGSAPGTSTEPSEGSAPGTSTEPSEGSAPGTSTEPSEGSAPGSPAGSPTSTEEGTSTEPSEGSAPGASSPPVLKRHQREITRTTLQSDQEEIDYDDTISVEMKKEDFDIYDEDENQSPRSFQKKTRHYFIAAVERLWDYGMSSSPHVLRNRAQSGGAPTSESATPESGPGSEPATSGSETPGTSESATPESGPGSEPATSGSETPGTSESATPESGPGTSTEPSEGSAPGTSESATPESGPGSPAGSPTSTEEGSPAGSPTSTEEGSPAGSPTSTEEGTSESATPESGPGTSTEPSEGSAPGASSSVPQFKKVVFQEFTDGSFTQPLYRGELNEHLGLLGPYIRAEVEDNIMVTFRNQASRPYSFYSSLISYEEDQRQGAEPRKNFVKPNETKTYFWKVQHHMAPTKDEFDCKAWAYFSDVDLEKDVHSGLIGPLLVCHTNTLNPAHGRQVTVQEFALFFTIFDETKSWYFTENMERNCRAPCNIQMEDPTFKENYRFHAINGYIMDTLPGLVMAQDQRIRWYLLSMGSNENIHSIHFSGHVFTVRKKEEYKMALYNLYPGVFETVEMLPSKAGIWRVECLIGEHLHAGMSTLFLVYSNKCQTPLGMASGHIRDFQITASGQYGQWAPKLARLHYSGSINAWSTKEPFSWIKVDLLAPMIIHGIKTQGARQKFSSLYISQFIIMYSLDGKKWQTYRGNSTGTLMVFFGNVDSSGIKHNIFNPPIIARYIRLHPTHYSIRSTLRMELMGCDLNSCSMPLGMESKAISDAQITASSYFTNMFATWSPSKARLHLQGRSNAWRPQVNNPKEWLQVDFQKTMKVTGVTTQGVKSLLTSMYVKEFLISSSQDGHQWTLFFQNGKVKVFQGNQDSFTPVVNSLDPPLLTRYLRIHPQSWVHQIALRMEVLGCEAQDLYGAPGTSESATPESGPGSEPATSGSETPGTSESATPESGPGSEPATSGSETPGTSESATPESGPGTSTEPSEGSAPGSPAGSPTSTEEGTSESATPESGPGSEPATSGSETPGTSESATPESGPGSPAGSPTSTEEGSPAGSPTSTEEGTSTEPSEGSAPGTSESATPESGPGTSESATPESGPGTSESATPESGPGSEPATSGSETPGSEPATSGSETPGSPAGSPTSTEEGTSTEPSEGSAPGTSTEPSEGSAPGSEPATSGSETPGTSESATPESGPGTSTEPSEGSAPASSEQKLISEEDLSPATGHHHHHH

SEQ ID NO: 1110 - DNA, 6162 bp, synthetic construct
  misc_feature 1..6162: note = Description of Artificial Sequence: Synthetic polynucleotide
  source 1..6162: mol_type = other DNA
gccaccagaagatactacctgggtgcagtggaactgtcatgggactatatgcaaagtgatctcggtgagctgcctgtggacgcaagatttcctcctagagtgccaaaatcttttccattcaacacctcagtcgtgtacaaaaagactctgtttgtagaattcacggatcaccttttcaacatcgctaagccaaggccaccctggatgggtctgctaggtcctaccatccaggctgaggtttatgatacagtggtcattacacttaagaacatggcttcccatcctgtcagtcttcatgctgttggtgtatcctactggaaagcttctgagggagctgaatatgatgatcagaccagtcaaagggagaaagaagatgataaagtcttccctggtggaagccatacatatgtctggcaggtcctgaaagagaatggtccaatggcctctgacccactgtgccttacctactcatatctttctcatgtggacctggtaaaagacttgaattcaggcctcattggagccctactagtatgtagagaagggagtctggccaaggaaaagacacagaccttgcacaaatttatactactttttgctgtatttgatgaagggaaaagttggcactcagaaacaaagaactccttgatgcaggatagggatgctgcatctgctcgggcctggcctaaaatgcacacagtcaatggttatgtaaacaggtctctgccaggtctgattggatgccacaggaaatcagtctattggcatgtgattggaatgggcaccactcctgaagtgcactcaatattcctcgaaggtcacacatttcttgtgaggaaccatcgccaggctagcttggaaatctcgccaataactttccttactgctcaaacactcttgatggaccttggacagtttctactgttttgtcatatctcttcccaccaacatgatggcatggaagcttatgtcaaagtagacagctgtccagaggaaccccaactacgaatgaaaaataatgaagaagcggaagactatgatgatgatcttactgattctgaaatggatgtggtcaggtttgatgatgacaactctccttcctttatccaaattcgctcagttgccaagaagcatcctaaaacttgggtacattacattgctgctgaagaggaggactgggactatgctcccttagtcctcgcccccgatgacagaagttataaaagtcaatatttgaacaatggccctcagcggattggtaggaagtacaaaaaagtccgatttatggcatacacagatgaaacctttaagactcgtgaagctattcagcatgaatcaggaatcttgggacctttactttatggggaagttggagacacactgttgattatatttaagaatcaagcaagcagaccatataacatctaccctcacggaatcactgatgtccgtcctttgtattcaaggagattaccaaaaggtgtaaaacatttgaaggattttccaattctgccaggagaaatattcaaatataaatggacagtgactgtagaagatgggccaactaaatcagatcctcggtgcctgacccgctattactctagtttcgttaatatggagagagatctagcttcaggactcattggccctctcctcatctgctacaaagaatctgtagatcaaagaggaaaccagataatgtcagacaagaggaatgtcatcctgttttctgtatttgatgagaaccgaagctggtacctcacagagaatatacaacgctttctccccaatccagctggagtgcagcttgaggatccagagttccaagcctccaacatcatgcacagcatcaatggctatgtttttgatagtttgcagttgtcagtttgtttgcatgaggtggcatactggtacattctaagcattggagcacagactgacttcctttctgtcttcttctctggatataccttcaaacacaaaatggtctatgaagacacactcaccctattcccattctcaggagaaactgtcttcatgtcgatggaaaacccaggtctatggattctggggtgccacaactcagactttcggaacagaggcatgaccgccttactgaaggtttctagttgtgacaagaacactggtgattattacgaggacagttatgaagatatttcagcatacttgctgagtaaaaacaatgccattgaaccaagaagcttctctcaaaacggcgcgccaagtcccgctggaagcccaactagcaccgaagaggggacctcagagtccgccacccccgagtccggccctggctctgagcctgccactagcggctccgagactcctggcacatccgaaagcgctacacccgagagtggacccggcacctctaccgagcccagtgagggctccgcccctggaacaagcaccgagcccagcgaaggcagcgccccagggacctccacagagcccagtgaaggcagtgctcctggcaccagcaccgaaccaagcgagggctctgcacccgggacctccaccgagccaagcgaaggctctgcccctggcacttccaccgagcccagcgaaggcagcgcccctgggagccccgctggctctcccaccagcactgaggagggcacatctaccgaaccaagtgaaggctctgcaccaggtgcctcgagcccaccagtcttgaaacgccatcaacgggaaataactcgtactactcttcagtcagatcaagaggaaatcgattatgatgataccatatcagttgaaatgaagaaggaagattttgacatttatgatgaggatgaaaatcagagcccccgcagctttcaaaagaaaacacgacactattttattgctgcagtggagaggctctgggattatgggatgagtagctccccacatgttctaagaaacagggctcagagtggcggcgcgccaacgtccgaaagtgctacccctgagtcaggccctggtagtgagcctgccacaagcggaagcgaaactccggggacctcagagtctgccactcccgaatcggggccaggctctgaaccggccacttcagggagcgaaacaccaggaacatcggagagcgctaccccggagagcgggccaggaactagtactgagcctagcgagggaagtgcacctggtacaagcgagtccgccacacccgagtctggccctggctctccagcgggctcacccacgagcactgaagagggctctcccgctggcagcccaacgtcgacagaagaaggatcaccagcaggctcccccacatcaacagaggagggtacatcagaatctgctactcccgagagtggacccggtacctccactgagcccagcgaggggagtgcaccaggtgcctcgagcagtgtccctcagttcaagaaagttgttttccaggaatttactgatggctcctttactcagcccttataccgtggagaactaaatgaacatttgggactcctggggccatatataagagcagaagttgaagataatatcatggtaactttcagaaatcaggcctctcgtccctattccttctattctagccttatttcttatgaggaagatcagaggcaaggagcagaacctagaaaaaactttgtcaagcctaatgaaaccaaaacttacttttggaaagtgcaacatcatatggcacccactaaagatgagtttgactgcaaagcctgggcttatttctctgatgttgacctggaaaaagatgtgcactcaggcctgattggaccccttctggtctgccacactaacacactgaaccctgctcatgggagacaagtgacagtacaggaatttgctctgtttttcaccatctttgatgagaccaaaagctggtacttcactgaaaatatggaaagaaactgcagggctccctgcaatatccagatggaagatcccacttttaaagagaattatcgcttccatgcaatcaatggctacataatggatacactacctggcttagtaatggctcaggatcaaaggattcgatggtatctgctcagcatgggcagcaatgaaaacatccattctattcatttcagtggacatgtgttcactgtacgaaaaaaagaggagtataaaatggcactgtacaatctctatccaggtgtttttgagacagtggaaatgttaccatccaaagctggaatttggcgggtggaatgccttattggcgagcatctacatgctgggatgagcacactttttctggtgtacagcaataagtgtcagactcccctgggaatggcttctggacacattagagattttcagattacagcttcaggacaatatggacagtgggccccaaagctggccagacttcattattccggatcaatcaatgcctggagcaccaaggagcccttttcttggatcaaggtggatctgttggcaccaatgattattcacggcatcaagacccagggtgcccgtcagaagttctccagcctctacatctctcagtttatcatcatgtatagtcttgatgggaagaagtggcagacttatcgaggaaattccactggaaccttaatggtcttctttggcaatgtggattcatctgggataaaacacaatatttttaaccctccaattattgctcgatacatccgtttgcacccaactcattatagcattcgcagcactcttcgcatggagttgatgggctgtgatttaaatagttgcagcatgccattgggaatggagagtaaagcaatatcagatgcacagattactgcttcatcctactttaccaatatgtttgccacctggtctccttcaaaagctcgacttcacctccaagggaggagtaatgcctggagacctcaggtgaataatccaaaagagtggctgcaagtggacttccagaagacaatgaaagtcacaggagtaactactcagggagtaaaatctctgcttaccagcatgtatgtgaaggagttcctcatctccagcagtcaagatggccatcagtggactctcttttttcagaatggcaaagtaaaggtttttcagggaaatcaagactccttcacacctgtggtgaactctctagacccaccgttactgactcgctaccttcgaattcacccccagagttgggtgcaccagattgccctgaggatggaggttctgggctgcgaggcacaggacctctacggcgcgccaggtacctcagagtctgctacccccgagtcagggccaggatcagagccagccacctccgggtctgagacacccgggacttccgagagtgccacccctgagtccggacccgggtccgagcccgccacttccggctccgaaactcccggcacaagcgagagcgctaccccagagtcaggaccaggaacatctacagagccctctgaaggctccgctccagggtccccagccggcagtcccactagcaccgaggagggaacctctgaaagcgccacacccgaatcagggccagggtctgagcctgctaccagcggcagcgagacaccaggcacctctgagtccgccacaccagagtccggacccggatctcccgctgggagccccacctccactgaggagggatctcctgctggctctccaacatctactgaggaaggtacctcaaccgagccatccgagggatcagctcccggcacctcagagtcggcaaccccggagtctggacccggaacttccgaaagtgccacaccagagtccggtcccgggacttcagaatcagcaacacccgagtccggccctgggtctgaacccgccacaagtggtagtgagacaccaggatcagaacctgctacctcagggtcagagacacccggatctccggcaggctcaccaacctccactgaggagggcaccagcacagaaccaagcgagggctccgcacccggaacaagcactgaacccagtgagggttcagcacccggctctgagccggccacaagtggcagtgagacacccggcacttcagagagtgccacccccgagagtggcccaggcactagtaccgagccctctgaaggcagtgcgccagcctcgagcgaacaaaaactcatctcagaagaggatctgtcacctgcaaccggtcatcatcaccatcaccattga

SEQ ID NO: 1111 - protein, 2053 aa, synthetic construct
  REGION 1..2053: note = Description of Artificial Sequence: Synthetic polypeptide
ATRRYYLGAVELSWDYMQSDLGELPVDARFPPRVPKSFPFNTSVVYKKTLFVEFTDHLFNIAKPRPPWMGLLGPTIQAEVYDTVVITLKNMASHPVSLHAVGVSYWKASEGAEYDDQTSQREKEDDKVFPGGSHTYVWQVLKENGPMASDPLCLTYSYLSHVDLVKDLNSGLIGALLVCREGSLAKEKTQTLHKFILLFAVFDEGKSWHSETKNSLMQDRDAASARAWPKMHTVNGYVNRSLPGLIGCHRKSVYWHVIGMGTTPEVHSIFLEGHTFLVRNHRQASLEISPITFLTAQTLLMDLGQFLLFCHISSHQHDGMEAYVKVDSCPEEPQLRMKNNEEAEDYDDDLTDSEMDVVRFDDDNSPSFIQIRSVAKKHPKTWVHYIAAEEEDWDYAPLVLAPDDRSYKSQYLNNGPQRIGRKYKKVRFMAYTDETFKTREAIQHESGILGPLLYGEVGDTLLIIFKNQASRPYNIYPHGITDVRPLYSRRLPKGVKHLKDFPILPGEIFKYKWTVTVEDGPTKSDPRCLTRYYSSFVNMERDLASGLIGPLLICYKESVDQRGNQIMSDKRNVILFSVFDENRSWYLTENIQRFLPNPAGVQLEDPEFQASNIMHSINGYVFDSLQLSVCLHEVAYWYILSIGAQTDFLSVFFSGYTFKHKMVYEDTLTLFPFSGETVFMSMENPGLWILGCHNSDFRNRGMTALLKVSSCDKNTGDYYEDSYEDISAYLLSKNNAIEPRSFSQNGAPSPAGSPTSTEEGTSESATPESGPGSEPATSGSETPGTSESATPESGPGTSTEPSEGSAPGTSTEPSEGSAPGTSTEPSEGSAPGTSTEPSEGSAPGTSTEPSEGSAPGTSTEPSEGSAPGSPAGSPTSTEEGTSTEPSEGSAPGASSPPVLKRHQAEITRTTLQSDQEEIDYDDTISVEMKKEDFDIYDEDENQSPRSFQKKTRHYFIAAVERLWDYGMSSSPHVLRNRAQSGSVPQFKKVVFQEFTDGSFTQPLYRGELNEHLGLLGPYIRAEVEDNIMVTFRNQASRPYSFYSSLISYEEDQRQGAEPRKNFVKPNETKTYFWKVQHHMAPTKDEFDCKAWAYFSDVDLEKDVHSGLIGPLLVCHTNTLNPAHGRQVTVQEFALFFTIFDETKSWYFTENMERNCRGAPTSESATPESGPGSEPATSGSETPGTSESATPESGPGSEPATSGSETPGTSESATPESGPGTSTEPSEGSAPGTSESATPESGPGSPAGSPTSTEEGSPAGSPTSTEEGSPAGSPTSTEEGTSESATPESGPGTSTEPSEGSAPGASSAPCNIQMEDPTFKENYRFHAINGYIMDTLPGLVMAQDQRIRWYLLSMGSNENIHSIHFSGHVFTVRKKEEYKMALYNLYPGVFETVEMLPSKAGIWRVECLIGEHLHAGMSTLFLVYSNKCQTPLGMASGHIRDFQITASGQYGQWAPKLARLHYSGSINAWSTKEPFSWIKVDLLAPMIIHGIKTQGARQKFSSLYISQFIIMYSLDGKKWQTYRGNSTGTLMVFFGNVDSSGIKHNIFNPPIIARYIRLHPTHYSIRSTLRMELMGCDLNSCSMPLGMESKAISDAQITASSYFTNMFATWSPSKARLHLQGRSNAWRPQVNNPKEWLQVDFQKTMKVTGVTTQGVKSLLTSMYVKEFLISSSQDGHQWTLFFQNGKVKVFQGNQDSFTPVVNSLDPPLLTRYLRIHPQSWVHQIALRMEVLGCEAQDLYGAPGTSESATPESGPGSEPATSGSETPGTSESATPESGPGSEPATSGSETPGTSESATPESGPGTSTEPSEGSAPGSPAGSPTSTEEGTSESATPESGPGSEPATSGSETPGTSESATPESGPGSPAGSPTSTEEGSPAGSPTSTEEGTSTEPSEGSAPGTSESATPESGPGTSESATPESGPGTSESATPESGPGSEPATSGSETPGSEPATSGSETPGSPAGSPTSTEEGTSTEPSEGSAPGTSTEPSEGSAPGSEPATSGSETPGTSESATPESGPGTSTEPSEGSAPASSEQKLISEEDLSPATGHHHHHH

SEQ ID NO: 1112 - DNA, 6162 bp, synthetic construct
  misc_feature 1..6162: note = Description of Artificial Sequence: Synthetic polynucleotide
  source 1..6162: mol_type = other DNA
gccaccagaagatactacctgggtgcagtggaactgtcatgggactatatgcaaagtgatctcggtgagctgcctgtggacgcaagatttcctcctagagtgccaaaatcttttccattcaacacctcagtcgtgtacaaaaagactctgtttgtagaattcacggatcaccttttcaacatcgctaagccaaggccaccctggatgggtctgctaggtcctaccatccaggctgaggtttatgatacagtggtcattacacttaagaacatggcttcccatcctgtcagtcttcatgctgttggtgtatcctactggaaagcttctgagggagctgaatatgatgatcagaccagtcaaagggagaaagaagatgataaagtcttccctggtggaagccatacatatgtctggcaggtcctgaaagagaatggtccaatggcctctgacccactgtgccttacctactcatatctttctcatgtggacctggtaaaagacttgaattcaggcctcattggagccctactagtatgtagagaagggagtctggccaaggaaaagacacagaccttgcacaaatttatactactttttgctgtatttgatgaagggaaaagttggcactcagaaacaaagaactccttgatgcaggatagggatgctgcatctgctcgggcctggcctaaaatgcacacagtcaatggttatgtaaacaggtctctgccaggtctgattggatgccacaggaaatcagtctattggcatgtgattggaatgggcaccactcctgaagtgcactcaatattcctcgaaggtcacacatttcttgtgaggaaccatcgccaggctagcttggaaatctcgccaataactttccttactgctcaaacactcttgatggaccttggacagtttctactgttttgtcatatctcttcccaccaacatgatggcatggaagcttatgtcaaagtagacagctgtccagaggaaccccaactacgaatgaaaaataatgaagaagcggaagactatgatgatgatcttactgattctgaaatggatgtggtcaggtttgatgatgacaactctccttcctttatccaaattcgctcagttgccaagaagcatcctaaaacttgggtacattacattgctgctgaagaggaggactgggactatgctcccttagtcctcgcccccgatgacagaagttataaaagtcaatatttgaacaatggccctcagcggattggtaggaagtacaaaaaagtccgatttatggcatacacagatgaaacctttaagactcgtgaagctattcagcatgaatcaggaatcttgggacctttactttatggggaagttggagacacactgttgattatatttaagaatcaagcaagcagaccatataacatctaccctcacggaatcactgatgtccgtcctttgtattcaaggagattaccaaaaggtgtaaaacatttgaaggattttccaattctgccaggagaaatattcaaatataaatggacagtgactgtagaagatgggccaactaaatcagatcctcggtgcctgacccgctattactctagtttcgttaatatggagagagatctagcttcaggactcattggccctctcctcatctgctacaaagaatctgtagatcaaagaggaaaccagataatgtcagacaagaggaatgtcatcctgttttctgtatttgatgagaaccgaagctggtacctcacagagaatatacaacgctttctccccaatccagctggagtgcagcttgaggatccagagttccaagcctccaacatcatgcacagcatcaatggctatgtttttgatagtttgcagttgtcagtttgtttgcatgaggtggcatactggtacattctaagcattggagcacagactgacttcctttctgtcttcttctctggatataccttcaaacacaaaatggtctatgaagacacactcaccctattcccattctcaggagaaactgtcttcatgtcgatggaaaacccaggtctatggattctggggtgccacaactcagactttcggaacagaggcatgaccgccttactgaaggtttctagttgtgacaagaacactggtgattattacgaggacagttatgaagatatttcagcatacttgctgagtaaaaacaatgccattgaaccaagaagcttctctcaaaacggcgcgccaagtcccgctggaagcccaactagcaccgaagaggggacctcagagtccgccacccccgagtccggccctggctctgagcctgccactagcggctccgagactcctggcacatccgaaagcgctacacccgagagtggacccggcacctctaccgagcccagtgagggctccgcccctggaacaagcaccgagcccagcgaaggcagcgccccagggacctccacagagcccagtgaaggcagtgctcctggcaccagcaccgaaccaagcgagggctctgcacccgggacctccaccgagccaagcgaaggctctgcccctggcacttccaccgagcccagcgaaggcagcgcccctgggagccccgctggctctcccaccagcactgaggagggcacatctaccgaaccaagtgaaggctctgcaccaggtgcctcgagcccaccagtcttgaaacgccatcaagctgaaataactcgtactactcttcagtcagatcaagaggaaatcgattatgatgataccatatcagttgaaatgaagaaggaagattttgacatttatgatgaggatgaaaatcagagcccccgcagctttcaaaagaaaacacgacactattttattgctgcagtggagaggctctgggattatgggatgagtagctccccacatgttctaagaaacagggctcagagtggcagtgtccctcagttcaagaaagttgttttccaggaatttactgatggctcctttactcagcccttataccgtggagaactaaatgaacatttgggactcctggggccatatataagagcagaagttgaagataatatcatggtaactttcagaaatcaggcctctcgtccctattccttctattctagccttatttcttatgaggaagatcagaggcaaggagcagaacctagaaaaaactttgtcaagcctaatgaaaccaaaacttacttttggaaagtgcaacatcatatggcacccactaaagatgagtttgactgcaaagcctgggcttatttctctgatgttgacctggaaaaagatgtgcactcaggcctgattggaccccttctggtctgccacactaacacactgaaccctgctcatgggagacaagtgacagtacaggaatttgctctgtttttcaccatctttgatgagaccaaaagctggtacttcactgaaaatatggaaagaaactgcaggggcgcgccaacgtccgaaagtgctacccctgagtcaggccctggtagtgagcctgccacaagcggaagcgaaactccggggacctcagagtctgccactcccgaatcggggccaggctctgaaccggccacttcagggagcgaaacaccaggaacatcggagagcgctaccccggagagcgggccaggaactagtactgagcctagcgagggaagtgcacctggtacaagcgagtccgccacacccgagtctggccctggctctccagcgggctcacccacgagcactgaagagggctctcccgctggcagcccaacgtcgacagaagaaggatcaccagcaggctcccccacatcaacagaggagggtacatcagaatctgctactcccgagagtggacccggtacctccactgagcccagcgaggggagtgcaccaggtgcctcgagcgctccctgcaatatccagatggaagatcccacttttaaagagaattatcgcttccatgcaatcaatggctacataatggatacactacctggcttagtaatggctcaggatcaaaggattcgatggtatctgctcagcatgggcagcaatgaaaacatccattctattcatttcagtggacatgtgttcactgtacgaaaaaaagaggagtataaaatggcactgtacaatctctatccaggtgtttttgagacagtggaaatgttaccatccaaagctggaatttggcgggtggaatgccttattggcgagcatctacatgctgggatgagcacactttttctggtgtacagcaataagtgtcagactcccctgggaatggcttctggacacattagagattttcagattacagcttcaggacaatatggacagtgggccccaaagctggccagacttcattattccggatcaatcaatgcctggagcaccaaggagcccttttcttggatcaaggtggatctgttggcaccaatgattattcacggcatcaagacccagggtgcccgtcagaagttctccagcctctacatctctcagtttatcatcatgtatagtcttgatgggaagaagtggcagacttatcgaggaaattccactggaaccttaatggtcttctttggcaatgtggattcatctgggataaaacacaatatttttaaccctccaattattgctcgatacatccgtttgcacccaactcattatagcattcgcagcactcttcgcatggagttgatgggctgtgatttaaatagttgcagcatgccattgggaatggagagtaaagcaatatcagatgcacagattactgcttcatcctactttaccaatatgtttgccacctggtctccttcaaaagctcgacttcacctccaagggaggagtaatgcctggagacctcaggtgaataatccaaaagagtggctgcaagtggacttccagaagacaatgaaagtcacaggagtaactactcagggagtaaaatctctgcttaccagcatgtatgtgaaggagttcctcatctccagcagtcaagatggccatcagtggactctcttttttcagaatggcaaagtaaaggtttttcagggaaatcaagactccttcacacctgtggtgaactctctagacccaccgttactgactcgctaccttcgaattcacccccagagttgggtgcaccagattgccctgaggatggaggttctgggctgcgaggcacaggacctctacggcgcgccaggtacctcagagtctgctacccccgagtcagggccaggatcagagccagccacctccgggtctgagacacccgggacttccgagagtgccacccctgagtccggacccgggtccgagcccgccacttccggctccgaaactcccggcacaagcgagagcgctaccccagagtcaggaccaggaacatctacagagccctctgaaggctccgctccagggtccccagccggcagtcccactagcaccgaggagggaacctctgaaagcgccacacccgaatcagggccagggtctgagcctgctaccagcggcagcgagacaccaggcacctctgagtccgccacaccagagtccggacccggatctcccgctgggagccccacctccactgaggagggatctcctgctggctctccaacatctactgaggaaggtacctcaaccgagccatccgagggatcagctcccggcacctcagagtcggcaaccccggagtctggacccggaacttccgaaagtgccacaccagagtccggtcccgggacttcagaatcagcaacacccgagtccggccctgggtctgaacccgccacaagtggtagtgagacaccaggatcagaacctgctacctcagggtcagagacacccggatctccggcaggctcaccaacctccactgaggagggcaccagcacagaaccaagcgagggctccgcacccggaacaagcactgaacccagtgagggttcagcacccggctctgagccggccacaagtggcagtgagacacccggcacttcagagagtgccacccccgagagtggcccaggcactagtaccgagccctctgaaggcagtgcgccagcctcgagcgaacaaaaactcatctcagaagaggatctgtcacctgcaaccggtcatcatcaccatcaccattga

SEQ ID NO: 1113 - protein, 2053 aa, synthetic construct
  REGION 1..2053: note = Description of Artificial Sequence: Synthetic polypeptide
ATRRYYLGAVELSWDYMQSDLGELPVDARFPPRVPKSFPFNTSVVYKKTLFVEFTDHLFNIAKPRPPWMGLLGPTIQAEVYDTVVITLKNMASHPVSLHAVGVSYWKASEGAEYDDQTSQREKEDDKVFPGGSHTYVWQVLKENGPMASDPLCLTYSYLSHVDLVKDLNSGLIGALLVCREGSLAKEKTQTLHKFILLFAVFDEGKSWHSETKNSLMQDRDAASARAWPKMHTVNGYVNRSLPGLIGCHRKSVYWHVIGMGTTPEVHSIFLEGHTFLVRNHRQASLEISPITFLTAQTLLMDLGQFLLFCHISSHQHDGMEAYVKVDSCPEEPQLRMKNNEEAEDYDDDLTDSEMDVVRFDDDNSPSFIQIRSVAKKHPKTWVHYIAAEEEDWDYAPLVLAPDDRSYKSQYLNNGPQRIGRKYKKVRFMAYTDETFKTREAIQHESGILGPLLYGEVGDTLLIIFKNQASRPYNIYPHGITDVRPLYSRRLPKGVKHLKDFPILPGEIFKYKWTVTVEDGPTKSDPRCLTRYYSSFVNMERDLASGLIGPLLICYKESVDQRGNQIMSDKRNVILFSVFDENRSWYLTENIQRFLPNPAGVQLEDPEFQASNIMHSINGYVFDSLQLSVCLHEVAYWYILSIGAQTDFLSVFFSGYTFKHKMVYEDTLTLFPFSGETVFMSMENPGLWILGCHNSDFRNRGMTALLKVSSCDKNTGDYYEDSYEDISAYLLSKNNAIEPRSFSQNGAPSPAGSPTSTEEGTSESATPESGPGSEPATSGSETPGTSESATPESGPGTSTEPSEGSAPGTSTEPSEGSAPGTSTEPSEGSAPGTSTEPSEGSAPGTSTEPSEGSAPGTSTEPSEGSAPGSPAGSPTSTEEGTSTEPSEGSAPGASSPPVLKRHQAEITRTTLQSDQEEIDYDDTISVEMKKEDFDIYDEDENQSPRSFQKKTRHYFIAAVERLWDYGMSSSPHVLRNRAQSGSVPQFKKVVFQEFTDGSFTQPLYRGELNEHLGLLGPYIRAEVEDNIMVTFRNQASRPYSFYSSLISYEEDQRQGAEPRKNFVKPNETKTYFWKVQHHMAPTKDEFDCKAWAYFSDVDLEKDVHSGLIGPLLVCHTNTLNPAHGRQVTVQEFALFFTIFDETKSWYFTENMERNCRAPCNIGAPGTPGSGTASSSPGASPGTSSTGSPGASPGTSSTGSPGASPGTSSTGSPGSSPSASTGTGPGTPGSGTASSSPGASPGTSSTGSPGASPGTSSTGSPGASPGTSSTGSPGSSTPSGATGSPGSSTPSGATGSPGASPGTSSTGSPASSQMEDPTFKENYRFHAINGYIMDTLPGLVMAQDQRIRWYLLSMGSNENIHSIHFSGHVFTVRKKEEYKMALYNLYPGVFETVEMLPSKAGIWRVECLIGEHLHAGMSTLFLVYSNKCQTPLGMASGHIRDFQITASGQYGQWAPKLARLHYSGSINAWSTKEPFSWIKVDLLAPMIIHGIKTQGARQKFSSLYISQFIIMYSLDGKKWQTYRGNSTGTLMVFFGNVDSSGIKHNIFNPPIIARYIRLHPTHYSIRSTLRMELMGCDLNSCSMPLGMESKAISDAQITASSYFTNMFATWSPSKARLHLQGRSNAWRPQVNNPKEWLQVDFQKTMKVTGVTTQGVKSLLTSMYVKEFLISSSQDGHQWTLFFQNGKVKVFQGNQDSFTPVVNSLDPPLLTRYLRIHPQSWVHQIALRMEVLGCEAQDLYGAPGTSESATPESGPGSEPATSGSETPGTSESATPESGPGSEPATSGSETPGTSESATPESGPGTSTEPSEGSAPGSPAGSPTSTEEGTSESATPESGPGSEPATSGSETPGTSESATPESGPGSPAGSPTSTEEGSPAGSPTSTEEGTSTEPSEGSAPGTSESATPESGPGTSESATPESGPGTSESATPESGPGSEPATSGSETPGSEPATSGSETPGSPAGSPTSTEEGTSTEPSEGSAPGTSTEPSEGSAPGSEPATSGSETPGTSESATPESGPGTSTEPSEGSAPASSEQKLISEEDLSPATGHHHHHH

SEQ ID NO: 1114 - DNA, 6162 bp, synthetic construct
  misc_feature 1..6162: note = Description of Artificial Sequence: Synthetic polynucleotide
  source 1..6162: mol_type = other DNA
gccaccagaagatactacctgggtgcagtggaactgtcatgggactatatgcaaagtgatctcggtgagctgcctgtggacgcaagatttcctcctagagtgccaaaatcttttccattcaacacctcagtcgtgtacaaaaagactctgtttgtagaattcacggatcaccttttcaacatcgctaagccaaggccaccctggatgggtctgctaggtcctaccatccaggctgaggtttatgatacagtggtcattacacttaagaacatggcttcccatcctgtcagtcttcatgctgttggtgtatcctactggaaagcttctgagggagctgaatatgatgatcagaccagtcaaagggagaaagaagatgataaagtcttccctggtggaagccatacatatgtctggcaggtcctgaaagagaatggtccaatggcctctgacccactgtgccttacctactcatatctttctcatgtggacctggtaaaagacttgaattcaggcctcattggagccctactagtatgtagagaagggagtctggccaaggaaaagacacagaccttgcacaaatttatactactttttgctgtatttgatgaagggaaaagttggcactcagaaacaaagaactccttgatgcaggatagggatgctgcatctgctcgggcctggcctaaaatgcacacagtcaatggttatgtaaacaggtctctgccaggtctgattggatgccacaggaaatcagtctattggcatgtgattggaatgggcaccactcctgaagtgcactcaatattcctcgaaggtcacacatttcttgtgaggaaccatcgccaggctagcttggaaatctcgccaataactttccttactgctcaaacactcttgatggaccttggacagtttctactgttttgtcatatctcttcccaccaacatgatggcatggaagcttatgtcaaagtagacagctgtccagaggaaccccaactacgaatgaaaaataatgaagaagcggaagactatgatgatgatcttactgattctgaaatggatgtggtcaggtttgatgatgacaactctccttcctttatccaaattcgctcagttgccaagaagcatcctaaaacttgggtacattacattgctgctgaagaggaggactgggactatgctcccttagtcctcgcccccgatgacagaagttataaaagtcaatatttgaacaatggccctcagcggattggtaggaagtacaaaaaagtccgatttatggcatacacagatgaaacctttaagactcgtgaagctattcagcatgaatcaggaatcttgggacctttactttatggggaagttggagacacactgttgattatatttaagaatcaagcaagcagaccatataacatctaccctcacggaatcactgatgtccgtcctttgtattcaaggagattaccaaaaggtgtaaaacatttgaaggattttccaattctgccaggagaaatattcaaatataaatggacagtgactgtagaagatgggccaactaaatcagatcctcggtgcctgacccgctattactctagtttcgttaatatggagagagatctagcttcaggactcattggccctctcctcatctgctacaaagaatctgtagatcaaagaggaaaccagataatgtcagacaagaggaatgtcatcctgttttctgtatttgatgagaaccgaagctggtacctcacagagaatatacaacgctttctccccaatccagctggagtgcagcttgaggatccagagttccaagcctccaacatcatgcacagcatcaatggctatgtttttgatagtttgcagttgtcagtttgtttgcatgaggtggcatactggtacattctaagcattggagcacagactgacttcctttctgtcttcttctctggatataccttcaaacacaaaatggtctatgaagacacactcaccctattcccattctcaggagaaactgtcttcatgtcgatggaaaacccaggtctatggattctggggtgccacaactcagactttcggaacagaggcatgaccgccttactgaaggtttctagttgtgacaagaacactggtgattattacgaggacagttatgaagatatttcagcatacttgctgagtaaaaacaatgccattgaaccaagaagcttctctcaaaacggcgcgccaagtcccgctggaagcccaactagcaccgaagaggggacctcagagtccgccacccccgagtccggccctggctctgagcctgccactagcggctccgagactcctggcacatccgaaagcgctacacccgagagtggacccggcacctctaccgagcccagtgagggctccgcccctggaacaagcaccgagcccagcgaaggcagcgccccagggacctccacagagcccagtgaaggcagtgctcctggcaccagcaccgaaccaagcgagggctctgcacccgggacctccaccgagccaagcgaaggctctgcccctggcacttccaccgagcccagcgaaggcagcgcccctgggagccccgctggctctcccaccagcactgaggagggcacatctaccgaaccaagtgaaggctctgcaccaggtgcctcgagcccaccagtcttgaaacgccatcaagctgaaataactcgtactactcttcagtcagatcaagaggaaatcgattatgatgataccatatcagttgaaatgaagaaggaagattttgacatttatgatgaggatgaaaatcagagcccccgcagctttcaaaagaaaacacgacactattttattgctgcagtggagaggctctgggattatgggatgagtagctccccacatgttctaagaaacagggctcagagtggcagtgtccctcagttcaagaaagttgttttccaggaatttactgatggctcctttactcagcccttataccgtggagaactaaatgaacatttgggactcctggggccatatataagagcagaagttgaagataatatcatggtaactttcagaaatcaggcctctcgtccctattccttctattctagccttatttcttatgaggaagatcagaggcaaggagcagaacctagaaaaaactttgtcaagcctaatgaaaccaaaacttacttttggaaagtgcaacatcatatggcacccactaaagatgagtttgactgcaaagcctgggcttatttctctgatgttgacctggaaaaagatgtgcactcaggcctgattggaccccttctggtctgccacactaacacactgaaccctgctcatgggagacaagtgacagtacaggaatttgctctgtttttcaccatctttgatgagaccaaaagctggtacttcactgaaaatatggaaagaaactgcagggctccctgcaatatcggcgcgccaggtacacccggatcgggtacagcgtcatcgagccccggtgcgtcacctggtacgtcgagcacggggtcgccaggggcgtcccctgggacgtcctcaacaggctcgcccggtgcgtcacccggcacgtcgtccacgggttcacctggtagctccccttccgcgtccactggcaccgggcctggaactccggggagcggcacagcgagctcgtcgccgggagcatcgcctgggacatcgagcaccgggtcgccaggagcatcgcccggaacatccagcacaggaagccccggcgcgtcgcccgggacatcaagcacaggttccccgggatcgagcacgccgtccggagccactggatcaccagggagctcgacaccttccggcgcaacgggatcgcccggagccagcccgggtacgtcaagcactggctcccctgcctcgagccagatggaagatcccacttttaaagagaattatcgcttccatgcaatcaatggctacataatggatacactacctggcttagtaatggctcaggatcaaaggattcgatggtatctgctcagcatgggcagcaatgaaaacatccattctattcatttcagtggacatgtgttcactgtacgaaaaaaagaggagtataaaatggcactgtacaatctctatccaggtgtttttgagacagtggaaatgttaccatccaaagctggaatttggcgggtggaatgccttattggcgagcatctacatgctgggatgagcacactttttctggtgtacagcaataagtgtcagactcccctgggaatggcttctggacacattagagattttcagattacagcttcaggacaatatggacagtgggccccaaagctggccagacttcattattccggatcaatcaatgcctggagcaccaaggagcccttttcttggatcaaggtggatctgttggcaccaatgattattcacggcatcaagacccagggtgcccgtcagaagttctccagcctctacatctctcagtttatcatcatgtatagtcttgatgggaagaagtggcagacttatcgaggaaattccactggaaccttaatggtcttctttggcaatgtggattcatctgggataaaacacaatatttttaaccctccaattattgctcgatacatccgtttgcacccaactcattatagcattcgcagcactcttcgcatggagttgatgggctgtgatttaaatagttgcagcatgccattgggaatggagagtaaagcaatatcagatgcacagattactgcttcatcctactttaccaatatgtttgccacctggtctccttcaaaagctcgacttcacctccaagggaggagtaatgcctggagacctcaggtgaataatccaaaagagtggctgcaagtggacttccagaagacaatgaaagtcacaggagtaactactcagggagtaaaatctctgcttaccagcatgtatgtgaaggagttcctcatctccagcagtcaagatggccatcagtggactctcttttttcagaatggcaaagtaaaggtttttcagggaaatcaagactccttcacacctgtggtgaactctctagacccaccgttactgactcgctaccttcgaattcacccccagagttgggtgcaccagattgccctgaggatggaggttctgggctgcgaggcacaggacctctacggcgcgccaggtacctcagagtctgctacccccgagtcagggccaggatcagagccagccacctccgggtctgagacacccgggacttccgagagtgccacccctgagtccggacccgggtccgagcccgccacttccggctccgaaactcccggcacaagcgagagcgctaccccagagtcaggaccaggaacatctacagagccctctgaaggctccgctccagggtccccagccggcagtcccactagcaccgaggagggaacctctgaaagcgccacacccgaatcagggccagggtctgagcctgctaccagcggcagcgagacaccaggcacctctgagtccgccacaccagagtccggacccggatctcccgctgggagccccacctccactgaggagggatctcctgctggctctccaacatctactgaggaaggtacctcaaccgagccatccgagggatcagctcccggcacctcagagtcggcaaccccggagtctggacccggaacttccgaaagtgccacaccagagtccggtcccgggacttcagaatcagcaacacccgagtccggccctgggtctgaacccgccacaagtggtagtgagacaccaggatcagaacctgctacctcagggtcagagacacccggatctccggcaggctcaccaacctccactgaggagggcaccagcacagaaccaagcgagggctccgcacccggaacaagcactgaacccagtgagggttcagcacccggctctgagccggccacaagtggcagtgagacacccggcacttcagagagtgccacccccgagagtggcccaggcactagtaccgagccctctgaaggcagtgcgccagcctcgagcgaacaaaaactcatctcagaagaggatctgtcacctgcaaccggtcatcatcaccatcaccattga

SEQ ID NO: 1115 - protein, 2053 aa, synthetic construct
  REGION 1..2053: note = Description of Artificial Sequence: Synthetic polypeptide
ATRRYYLGAVELSWDYMQSDLGELPVDARFPPRVPKSFPFNTSVVYKKTLFVEFTDHLFNIAKPRPPWMGLLGPTIQAEVYDTVVITLKNMASHPVSLHAVGVSYWKASEGAEYDDQTSQREKEDDKVFPGGSHTYVWQVLKENGPMASDPLCLTYSYLSHVDLVKDLNSGLIGALLVCREGSLAKEKTQTLHKFILLFAVFDEGKSWHSETKNSLMQDRDAASARAWPKMHTVNGYVNRSLPGLIGCHRKSVYWHVIGMGTTPEVHSIFLEGHTFLVRNHRQASLEISPITFLTAQTLLMDLGQFLLFCHISSHQHDGMEAYVKVDSCPEEPQLRMKNNEEAEDYDDDLTDSEMDVVRFDDDNSPSFIQIRSVAKKHPKTWVHYIAAEEEDWDYAPLVLAPDDRSYKSQYLNNGPQRIGRKYKKVRFMAYTDETFKTREAIQHESGILGPLLYGEVGDTLLIIFKNQASRPYNIYPHGITDVRPLYSRRLPKGVKHLKDFPILPGEIFKYKWTVTVEDGPTKSDPRCLTRYYSSFVNMERDLASGLIGPLLICYKESVDQRGNQIMSDKRNVILFSVFDENRSWYLTENIQRFLPNPAGVQLEDPEFQASNIMHSINGYVFDSLQLSVCLHEVAYWYILSIGAQTDFLSVFFSGYTFKHKMVYEDTLTLFPFSGETVFMSMENPGLWILGCHNSDFRNRGMTALLKVSSCDKNTGDYYEDSYEDISAYLLSKNNAIEPRSFSQNGAPSPAGSPTSTEEGTSESATPESGPGSEPATSGSETPGTSESATPESGPGTSTEPSEGSAPGTSTEPSEGSAPGTSTEPSEGSAPGTSTEPSEGSAPGTSTEPSEGSAPGTSTEPSEGSAPGSPAGSPTSTEEGTSTEPSEGSAPGASSPPVLKRHQAEITRTTLQSDQEEIDYDDTISVEMKKEDFDIYDEDENQSPRSFQKKTRHYFIAAVERLWDYGMSSSPHVLRNRAQSGSVPQFKKVVFQEFTDGSFTQPLYRGELNEHLGLLGPYIRAEVEDNIMVTFRNQASRPYSFYSSLISYEEDQRQGAEPRKNFVKPNETKTYFWKVQHHMAPTKDEFDCKAWAYFSDVDLEKDVHSGLIGPLLVCHTNTLNPAHGRQVTVQEFALFFTIFDETKSWYFTENMERNCRGAPGTPGSGTASSSPGASPGTSSTGSPGASPGTSSTGSPGASPGTSSTGSPGSSPSASTGTGPGTPGSGTASSSPGASPGTSSTGSPGASPGTSSTGSPGASPGTSSTGSPGSSTPSGATGSPGSSTPSGATGSPGASPGTSSTGSPASSAPCNIQMEDPTFKENYRFHAINGYIMDTLPGLVMAQDQRIRWYLLSMGSNENIHSIHFSGHVFTVRKKEEYKMALYNLYPGVFETVEMLPSKAGIWRVECLIGEHLHAGMSTLFLVYSNKCQTPLGMASGHIRDFQITASGQYGQWAPKLARLHYSGSINAWSTKEPFSWIKVDLLAPMIIHGIKTQGARQKFSSLYISQFIIMYSLDGKKWQTYRGNSTGTLMVFFGNVDSSGIKHNIFNPPIIARYIRLHPTHYSIRSTLRMELMGCDLNSCSMPLGMESKAISDAQITASSYFTNMFATWSPSKARLHLQGRSNAWRPQVNNPKEWLQVDFQKTMKVTGVTTQGVKSLLTSMYVKEFLISSSQDGHQWTLFFQNGKVKVFQGNQDSFTPVVNSLDPPLLTRYLRIHPQSWVHQIALRMEVLGCEAQDLYGAPGTSESATPESGPGSEPATSGSETPGTSESATPESGPGSEPATSGSETPGTSESATPESGPGTSTEPSEGSAPGSPAGSPTSTEEGTSESATPESGPGSEPATSGSETPGTSESATPESGPGSPAGSPTSTEEGSPAGSPTSTEEGTSTEPSEGSAPGTSESATPESGPGTSESATPESGPGTSESATPESGPGSEPATSGSETPGSEPATSGSETPGSPAGSPTSTEEGTSTEPSEGSAPGTSTEPSEGSAPGSEPATSGSETPGTSESATPESGPGTSTEPSEGSAPASSEQKLISEEDLSPATGHHHHHH

SEQ ID NO: 1116 - DNA, 6162 bp, synthetic construct
  misc_feature 1..6162: note = Description of Artificial Sequence: Synthetic polynucleotide
  source 1..6162: mol_type = other DNA
gccaccagaagatactacctgggtgcagtggaactgtcatgggactatatgcaaagtgatctcggtgagctgcctgtggacgcaagatttcctcctagagtgccaaaatcttttccattcaacacctcagtcgtgtacaaaaagactctgtttgtagaattcacggatcaccttttcaacatcgctaagccaaggccaccctggatgggtctgctaggtcctaccatccaggctgaggtttatgatacagtggtcattacacttaagaacatggcttcccatcctgtcagtcttcatgctgttggtgtatcctactggaaagcttctgagggagctgaatatgatgatcagaccagtcaaagggagaaagaagatgataaagtcttccctggtggaagccatacatatgtctggcaggtcctgaaagagaatggtccaatggcctctgacccactgtgccttacctactcatatctttctcatgtggacctggtaaaagacttgaattcaggcctcattggagccctactagtatgtagagaagggagtctggccaaggaaaagacacagaccttgcacaaatttatactactttttgctgtatttgatgaagggaaaagttggcactcagaaacaaagaactccttgatgcaggatagggatgctgcatctgctcgggcctggcctaaaatgcacacagtcaatggttatgtaaacaggtctctgccaggtctgattggatgccacaggaaatcagtctattggcatgtgattggaatgggcaccactcctgaagtgcactcaatattcctcgaaggtcacacatttcttgtgaggaaccatcgccaggctagcttggaaatctcgccaataactttccttactgctcaaacactcttgatggaccttggacagtttctactgttttgtcatatctcttcccaccaacatgatggcatggaagcttatgtcaaagtagacagctgtccagaggaaccccaactacgaatgaaaaataatgaagaagcggaagactatgatgatgatcttactgattctgaaatggatgtggtcaggtttgatgatgacaactctccttcctttatccaaattcgctcagttgccaagaagcatcctaaaacttgggtacattacattgctgctgaagaggaggactgggactatgctcccttagtcctcgcccccgatgacagaagttataaaagtcaatatttgaacaatggccctcagcggattggtaggaagtacaaaaaagtccgatttatggcatacacagatgaaacctttaagactcgtgaagctattcagcatgaatcaggaatcttgggacctttactttatggggaagttggagacacactgttgattatatttaagaatcaagcaagcagaccatataacatctaccctcacggaatcactgatgtccgtcctttgtattcaaggagattaccaaaaggtgtaaaacatttgaaggattttccaattctgccaggagaaatattcaaatataaatggacagtgactgtagaagatgggccaactaaatcagatcctcggtgcctgacccgctattactctagtttcgttaatatggagagagatctagcttcaggactcattggccctctcctcatctgctacaaagaatctgtagatcaaagaggaaaccagataatgtcagacaagaggaatgtcatcctgttttctgtatttgatgagaaccgaagctggtacctcacagagaatatacaacgctttctccccaatccagctggagtgcagcttgaggatccagagttccaagcctccaacatcatgcacagcatcaatggctatgtttttgatagtttgcagttgtcagtttgtttgcatgaggtggcatactggtacattctaagcattggagcacagactgacttcctttctgtcttcttctctggatataccttcaaacacaaaatggtctatgaagacacactcaccctattcccattctcaggagaaactgtcttcatgtcgatggaaaacccaggtctatggattctggggtgccacaactcagactttcggaacagaggcatgaccgccttactgaaggtttctagttgtgacaagaacactggtgattattacgaggacagttatgaagatatttcagcatacttgctgagtaaaaacaatgccattgaaccaagaagcttctctcaaaacggcgcgccaagtcccgctggaagcccaactagcaccgaagaggggacctcagagtccgccacccccgagtccggccctggctctgagcctgccactagcggctccgagactcctggcacatccgaaagcgctacacccgagagtggacccggcacctctaccgagcccagtgagggctccgcccctggaacaagcaccgagcccagcgaaggcagcgccccagggacctccacagagcccagtgaaggcagtgctcctggcaccagcaccgaaccaagcgagggctctgcacccgggacctccaccgagccaagcgaaggctctgcccctggcacttccaccgagcccagcgaaggcagcgcccctgggagccccgctggctctcccaccagcactgaggagggcacatctaccgaaccaagtgaaggctctgcaccaggtgcctcgagcccaccagtcttgaaacgccatcaagctgaaataactcgtactactcttcagtcagatcaagaggaaatcgattatgatgataccatatcagttgaaatgaagaaggaagattttgacatttatgatgaggatgaaaatcagagcccccgcagctttcaaaagaaaacacgacactattttattgctgcagtggagaggctctgggattatgggatgagtagctccccacatgttctaagaaacagggctcagagtggcagtgtccctcagttcaagaaagttgttttccaggaatttactgatggctcctttactcagcccttataccgtggagaactaaatgaacatttgggactcctggggccatatataagagcagaagttgaagataatatcatggtaactttcagaaatcaggcctctcgtccctattccttctattctagccttatttcttatgaggaagatcagaggcaaggagcagaacctagaaaaaactttgtcaagcctaatgaaaccaaaacttacttttggaaagtgcaacatcatatggcacccactaaagatgagtttgactgcaaagcctgggcttatttctctgatgttgacctggaaaaagatgtgcactcaggcctgattggaccccttctggtctgccacactaacacactgaaccctgctcatgggagacaagtgacagtacaggaatttgctctgtttttcaccatctttgatgagaccaaaagctggtacttcactgaaaatatggaaagaaactgcaggggcgcgccaggtacacccggatcgggtacagcgtcatcgagccccggtgcgtcacctggtacgtcgagcacggggtcgccaggggcgtcccctgggacgtcctcaacaggctcgcccggtgcgtcacccggcacgtcgtccacgggttcacctggtagctccccttccgcgtccactggcaccgggcctggaactccggggagcggcacagcgagctcgtcgccgggagcatcgcctgggacatcgagcaccgggtcgccaggagcatcgcccggaacatccagcacaggaagccccggcgcgtcgcccgggacatcaagcacaggttccccgggatcgagcacgccgtccggagccactggatcaccagggagctcgacaccttccggcgcaacgggatcgcccggagccagcccgggtacgtcaagcactggctcccctgcctcgagcgctccctgcaatatccagatggaagatcccacttttaaagagaattatcgcttccatgcaatcaatggctacataatggatacactacctggcttagtaatggctcaggatcaaaggattcgatggtatctgctcagcatgggcagcaatgaaaacatccattctattcatttcagtggacatgtgttcactgtacgaaaaaaagaggagtataaaatggcactgtacaatctctatccaggtgtttttgagacagtggaaatgttaccatccaaagctggaatttggcgggtggaatgccttattggcgagcatctacatgctgggatgagcacactttttctggtgtacagcaataagtgtcagactcccctgggaatggcttctggacacattagagattttcagattacagcttcaggacaatatggacagtgggccccaaagctggccagacttcattattccggatcaatcaatgcctggagcaccaaggagcccttttcttggatcaaggtggatctgttggcaccaatgattattcacggcatcaagacccagggtgcccgtcagaagttctccagcctctacatctctcagtttatcatcatgtatagtcttgatgggaagaagtggcagacttatcgaggaaattccactggaaccttaatggtcttctttggcaatgtggattcatctgggataaaacacaatatttttaaccctccaattattgctcgatacatccgtttgcacccaactcattatagcattcgcagcactcttcgcatggagttgatgggctgtgatttaaatagttgcagcatgccattgggaatggagagtaaagcaatatcagatgcacagattactgcttcatcctactttaccaatatgtttgccacctggtctccttcaaaagctcgacttcacctccaagggaggagtaatgcctggagacctcaggtgaataatccaaaagagtggctgcaagtggacttccagaagacaatgaaagtcacaggagtaactactcagggagtaaaatctctgcttaccagcatgtatgtgaaggagttcctcatctccagcagtcaagatggccatcagtggactctcttttttcagaatggcaaagtaaaggtttttcagggaaatcaagactccttcacacctgtggtgaactctctagacccaccgttactgactcgctaccttcgaattcacccccagagttgggtgcaccagattgccctgaggatggaggttctgggctgcgaggcacaggacctctacggcgcgccaggtacctcagagtctgctacccccgagtcagggccaggatcagagccagccacctccgggtctgagacacccgggacttccgagagtgccacccctgagtccggacccgggtccgagcccgccacttccggctccgaaactcccggcacaagcgagagcgctaccccagagtcaggaccaggaacatctacagagccctctgaaggctccgctccagggtccccagccggcagtcccactagcaccgaggagggaacctctgaaagcgccacacccgaatcagggccagggtctgagcctgctaccagcggcagcgagacaccaggcacctctgagtccgccacaccagagtccggacccggatctcccgctgggagccccacctccactgaggagggatctcctgctggctctccaacatctactgaggaaggtacctcaaccgagccatccgagggatcagctcccggcacctcagagtcggcaaccccggagtctggacccggaacttccgaaagtgccacaccagagtccggtcccgggacttcagaatcagcaacacccgagtccggccctgggtctgaacccgccacaagtggtagtgagacaccaggatcagaacctgctacctcagggtcagagacacccggatctccggcaggctcaccaacctccactgaggagggcaccagcacagaaccaagcgagggctccgcacccggaacaagcactgaacccagtgagggttcagcacccggctctgagccggccacaagtggcagtgagacacccggcacttcagagagtgccacccccgagagtggcccaggcactagtaccgagccctctgaaggcagtgcgccagcctcgagcgaacaaaaactcatctcagaagaggatctgtcacctgcaaccggtcatcatcaccatcaccattga

SEQ ID NO: 1117 - protein, 2053 aa, synthetic construct
  REGION 1..2053: note = Description of Artificial Sequence: Synthetic polypeptide
ATRRYYLGAVELSWDYMQSDLGELPVDARFPPRVPKSFPFNTSVVYKKTLFVEFTDHLFNIAKPRPPWMGLLGPTIQAEVYDTVVITLKNMASHPVSLHAVGVSYWKASEGAEYDDQTSQREKEDDKVFPGGSHTYVWQVLKENGPMASDPLCLTYSYLSHVDLVKDLNSGLIGALLVCREGSLAKEKTQTLHKFILLFAVFDEGKSWHSETKNSLMQDRDAASARAWPKMHTVNGYVNRSLPGLIGCHRKSVYWHVIGMGTTPEVHSIFLEGHTFLVRNHRQASLEISPITFLTAQTLLMDLGQFLLFCHISSHQHDGMEAYVKVDSCPEEPQLRMKNNEEAEDYDDDLTDSEMDVVRFDDDNSPSFIQIRSVAKKHPKTWVHYIAAEEEDWDYAPLVLAPDDRSYKSQYLNNGPQRIGRKYKKVRFMAYTDETFKTREAIQHESGILGPLLYGEVGDTLLIIFKNQASRPYNIYPHGITDVRPLYSRRLPKGVKHLKDFPILPGEIFKYKWTVTVEDGPTKSDPRCLTRYYSSFVNMERDLASGLIGPLLICYKESVDQRGNQIMSDKRNVILFSVFDENRSWYLTENIQRFLPNPAGVQLEDPEFQASNIMHSINGYVFDSLQLSVCLHEVAYWYILSIGAQTDFLSVFFSGYTFKHKMVYEDTLTLFPFSGETVFMSMENPGLWILGCHNSDFRNRGMTALLKVSSCDKNTGDYYEDSYEDISAYLLSKNNAIEPRSFSQNGAPSPAGSPTSTEEGTSESATPESGPGSEPATSGSETPGTSESATPESGPGTSTEPSEGSAPGTSTEPSEGSAPGTSTEPSEGSAPGTSTEPSEGSAPGTSTEPSEGSAPGTSTEPSEGSAPGSPAGSPTSTEEGTSTEPSEGSAPGASSPPVLKRHQREITRTTLQSDQEEIDYDDTISVEMKKEDFDIYDEDENQSPRSFQKKTRHYFIAAVERLWDYGMSSSPHVLRNRAQSGSVPQFKKVVFQEFTDGSFTQPLYRGELNEHLGLLGPYIRAEVEDNIMVTFRNQASRPYSFYSSLISYEEDQRQGAEPRKNFVKPNETKTYFWKVQHHMAPTKDEFDCKAWAYFSDVDLEKDVHSGLIGPLLVCHTNTLNPAHGRQVTVQEFALFFTIFDETKSWYFTENMERNCRGAPGTPGSGTASSSPGASPGTSSTGSPGASPGTSSTGSPGASPGTSSTGSPGSSPSASTGTGPGTPGSGTASSSPGASPGTSSTGSPGASPGTSSTGSPGASPGTSSTGSPGSSTPSGATGSPGSSTPSGATGSPGASPGTSSTGSPASSAPCNIQMEDPTFKENYRFHAINGYIMDTLPGLVMAQDQRIRWYLLSMGSNENIHSIHFSGHVFTVRKKEEYKMALYNLYPGVFETVEMLPSKAGIWRVECLIGEHLHAGMSTLFLVYSNKCQTPLGMASGHIRDFQITASGQYGQWAPKLARLHYSGSINAWSTKEPFSWIKVDLLAPMIIHGIKTQGARQKFSSLYISQFIIMYSLDGKKWQTYRGNSTGTLMVFFGNVDSSGIKHNIFNPPIIARYIRLHPTHYSIRSTLRMELMGCDLNSCSMPLGMESKAISDAQITASSYFTNMFATWSPSKARLHLQGRSNAWRPQVNNPKEWLQVDFQKTMKVTGVTTQGVKSLLTSMYVKEFLISSSQDGHQWTLFFQNGKVKVFQGNQDSFTPVVNSLDPPLLTRYLRIHPQSWVHQIALRMEVLGCEAQDLYGAPGTSESATPESGPGSEPATSGSETPGTSESATPESGPGSEPATSGSETPGTSESATPESGPGTSTEPSEGSAPGSPAGSPTSTEEGTSESATPESGPGSEPATSGSETPGTSESATPESGPGSPAGSPTSTEEGSPAGSPTSTEEGTSTEPSEGSAPGTSESATPESGPGTSESATPESGPGTSESATPESGPGSEPATSGSETPGSEPATSGSETPGSPAGSPTSTEEGTSTEPSEGSAPGTSTEPSEGSAPGSEPATSGSETPGTSESATPESGPGTSTEPSEGSAPASSEQKLISEEDLSPATGHHHHHH

SEQ ID NO: 1118 - DNA, 6162 bp, synthetic construct
  misc_feature 1..6162: note = Description of Artificial Sequence: Synthetic polynucleotide
  source 1..6162: mol_type = other DNA
gccaccagaagatactacctgggtgcagtggaactgtcatgggactatatgcaaagtgatctcggtgagctgcctgtggacgcaagatttcctcctagagtgccaaaatcttttccattcaacacctcagtcgtgtacaaaaagactctgtttgtagaattcacggatcaccttttcaacatcgctaagccaaggccaccctggatgggtctgctaggtcctaccatccaggctgaggtttatgatacagtggtcattacacttaagaacatggcttcccatcctgtcagtcttcatgctgttggtgtatcctactggaaagcttctgagggagctgaatatgatgatcagaccagtcaaagggagaaagaagatgataaagtcttccctggtggaagccatacatatgtctggcaggtcctgaaagagaatggtccaatggcctctgacccactgtgccttacctactcatatctttctcatgtggacctggtaaaagacttgaattcaggcctcattggagccctactagtatgtagagaagggagtctggccaaggaaaagacacagaccttgcacaaatttatactactttttgctgtatttgatgaagggaaaagttggcactcagaaacaaagaactccttgatgcaggatagggatgctgcatctgctcgggcctggcctaaaatgcacacagtcaatggttatgtaaacaggtctctgccaggtctgattggatgccacaggaaatcagtctattggcatgtgattggaatgggcaccactcctgaagtgcactcaatattcctcgaaggtcacacatttcttgtgaggaaccatcgccaggctagcttggaaatctcgccaataactttccttactgctcaaacactcttgatggaccttggacagtttctactgttttgtcatatctcttcccaccaacatgatggcatggaagcttatgtcaaagtagacagctgtccagaggaaccccaactacgaatgaaaaataatgaagaagcggaagactatgatgatgatcttactgattctgaaatggatgtggtcaggtttgatgatgacaactctccttcctttatccaaattcgctcagttgccaagaagcatcctaaaacttgggtacattacattgctgctgaagaggaggactgggactatgctcccttagtcctcgcccccgatgacagaagttataaaagtcaatatttgaacaatggccctcagcggattggtaggaagtacaaaaaagtccgatttatggcatacacagatgaaacctttaagactcgtgaagctattcagcatgaatcaggaatcttgggacctttactttatggggaagttggagacacactgttgattatatttaagaatcaagcaagcagaccatataacatctaccctcacggaatcactgatgtccgtcctttgtattcaaggagattaccaaaaggtgtaaaacatttgaaggattttccaattctgccaggagaaatattcaaatataaatggacagtgactgtagaagatgggccaactaaatcagatcctcggtgcctgacccgctattactctagtttcgttaatatggagagagatctagcttcaggactcattggccctctcctcatctgctacaaagaatctgtagatcaaagaggaaaccagataatgtcagacaagaggaatgtcatcctgttttctgtatttgatgagaaccgaagctggtacctcacagagaatatacaacgctttctccccaatccagctggagtgcagcttgaggatccagagttccaagcctccaacatcatgcacagcatcaatggctatgtttttgatagtttgcagttgtcagtttgtttgcatgaggtggcatactggtacattctaagcattggagcacagactgacttcctttctgtcttcttctctggatataccttcaaacacaaaatggtctatgaagacacactcaccctattcccattctcaggagaaactgtcttcatgtcgatggaaaacccaggtctatggattctggggtgccacaactcagactttcggaacagaggcatgaccgccttactgaaggtttctagttgtgacaagaacactggtgattattacgaggacagttatgaagatatttcagcatacttgctgagtaaaaacaatgccattgaaccaagaagcttctctcaaaacggcgcgccaagtcccgctggaagcccaactagcaccgaagaggggacctcagagtccgccacccccgagtccggccctggctctgagcctgccactagcggctccgagactcctggcacatccgaaagcgctacacccgagagtggacccggcacctctaccgagcccagtgagggctccgcccctggaacaagcaccgagcccagcgaaggcagcgccccagggacctccacagagcccagtgaaggcagtgctcctggcaccagcaccgaaccaagcgagggctctgcacccgggacctccaccgagccaagcgaaggctctgcccctggcacttccaccgagcccagcgaaggcagcgcccctgggagccccgctggctctcccaccagcactgaggagggcacatctaccgaaccaagtgaaggctctgcaccaggtgcctcgagcccaccagtcttgaaacgccatcaacgggaaataactcgtactactcttcagtcagatcaagaggaaatcgattatgatgataccatatcagttgaaatgaagaaggaagattttgacatttatgatgaggatgaaaatcagagcccccgcagctttcaaaagaaaacacgacactattttattgctgcagtggagaggctctgggattatgggatgagtagctccccacatgttctaagaaacagggctcagagtggcagtgtccctcagttcaagaaagttgttttccaggaatttactgatggctcctttactcagcccttataccgtggagaactaaatgaacatttgggactcctggggccatatataagagcagaagttgaagataatatcatggtaactttcagaaatcaggcctctcgtccctattccttctattctagccttatttcttatgaggaagatcagaggcaaggagcagaacctagaaaaaactttgtcaagcctaatgaaaccaaaacttacttttggaaagtgcaacatcatatggcacccactaaagatgagtttgactgcaaagcctgggcttatttctctgatgttgacctggaaaaagatgtgcactcaggcctgattggaccccttctggtctgccacactaacacactgaaccctgctcatgggagacaagtgacagtacaggaatttgctctgtttttcaccatctttgatgagaccaaaagctggtacttcactgaaaatatggaaagaaactgcaggggcgcgccaggtacacccggatcgggtacagcgtcatcgagccccggtgcgtcacctggtacgtcgagcacggggtcgccaggggcgtcccctgggacgtcctcaacaggctcgcccggtgcgtcacccggcacgtcgtccacgggttcacctggtagctccccttccgcgtccactggcaccgggcctggaactccggggagcggcacagcgagctcgtcgccgggagcatcgcctgggacatcgagcaccgggtcgccaggagcatcgcccggaacatccagcacaggaagccccggcgcgtcgcccgggacatcaagcacaggttccccgggatcgagcacgccgtccggagccactggatcaccagggagctcgacaccttccggcgcaacgggatcgcccggagccagcccgggtacgtcaagcactggctcccctgcctcgagcgctccctgcaatatccagatggaagatcccacttttaaagagaattatcgcttccatgcaatcaatggctacataatggatacactacctggcttagtaatggctcaggatcaaaggattcgatggtatctgctcagcatgggcagcaatgaaaacatccattctattcatttcagtggacatgtgttcactgtacgaaaaaaagaggagtataaaatggcactgtacaatctctatccaggtgtttttgagacagtggaaatgttaccatccaaagctggaatttggcgggtggaatgccttattggcgagcatctacatgctgggatgagcacactttttctggtgtacagcaataagtgtcagactcccctgggaatggcttctggacacattagagattttcagattacagcttcaggacaatatggacagtgggccccaaagctggccagacttcattattccggatcaatcaatgcctggagcaccaaggagcccttttcttggatcaaggtggatctgttggcaccaatgattattcacggcatcaagacccagggtgcccgtcagaagttctccagcctctacatctctcagtttatcatcatgtatagtcttgatgggaagaagtggcagacttatcgaggaaattccactggaaccttaatggtcttctttggcaatgtggattcatctgggataaaacacaatatttttaaccctccaattattgctcgatacatccgtttgcacccaactcattatagcattcgcagcactcttcgcatggagttgatgggctgtgatttaaatagttgcagcatgccattgggaatggagagtaaagcaatatcagatgcacagattactgcttcatcctactttaccaatatgtttgccacctggtctccttcaaaagctcgacttcacctccaagggaggagtaatgcctggagacctcaggtgaataatccaaaagagtggctgcaagtggacttccagaagacaatgaaagtcacaggagtaactactcagggagtaaaatctctgcttaccagcatgtatgtgaaggagttcctcatctccagcagtcaagatggccatcagtggactctcttttttcagaatggcaaagtaaaggtttttcagggaaatcaagactccttcacacctgtggtgaactctctagacccaccgttactgactcgctaccttcgaattcacccccagagttgggtgcaccagattgccctgaggatggaggttctgggctgcgaggcacaggacctctacggcgcgccaggtacctcagagtctgctacccccgagtcagggccaggatcagagccagccacctccgggtctgagacacccgggacttccgagagtgccacccctgagtccggacccgggtccgagcccgccacttccggctccgaaactcccggcacaagcgagagcgctaccccagagtcaggaccaggaacatctacagagccctctgaaggctccgctccagggtccccagccggcagtcccactagcaccgaggagggaacctctgaaagcgccacacccgaatcagggccagggtctgagcctgctaccagcggcagcgagacaccaggcacctctgagtccgccacaccagagtccggacccggatctcccgctgggagccccacctccactgaggagggatctcctgctggctctccaacatctactgaggaaggtacctcaaccgagccatccgagggatcagctcccggcacctcagagtcggcaaccccggagtctggacccggaacttccgaaagtgccacaccagagtccggtcccgggacttcagaatcagcaacacccgagtccggccctgggtctgaacccgccacaagtggtagtgagacaccaggatcagaacctgctacctcagggtcagagacacccggatctccggcaggctcaccaacctccactgaggagggcaccagcacagaaccaagcgagggctccgcacccggaacaagcactgaacccagtgagggttcagcacccggctctgagccggccacaagtggcagtgagacacccggcacttcagagagtgccacccccgagagtggcccaggcactagtaccgagccctctgaaggcagtgcgccagcctcgagcgaacaaaaactcatctcagaagaggatctgtcacctgcaaccggtcatcatcaccatcaccattga

SEQ ID NO: 1119 - protein, 2053 aa, synthetic construct
  REGION 1..2053: note = Description of Artificial Sequence: Synthetic polypeptide
ATRRYYLGAVELSWDYMQSDLGELPVDARFPPRVPKSFPFNTSVVYKKTLFVEFTDHLFNIAKPRPPWMGLLGPTIQAEVYDTVVITLKNMASHPVSLHAVGVSYWKASEGAEYDDQTSQREKEDDKVFPGGSHTYVWQVLKENGPMASDPLCLTYSYLSHVDLVKDLNSGLIGALLVCREGSLAKEKTQTLHKFILLFAVFDEGKSWHSETKNSLMQDRDAASARAWPKMHTVNGYVNRSLPGLIGCHRKSVYWHVIGMGTTPEVHSIFLEGHTFLVRNHRQASLEISPITFLTAQTLLMDLGQFLLFCHISSHQHDGMEAYVKVDSCPEEPQLRMKNNEEAEDYDDDLTDSEMDVVRFDDDNSPSFIQIRSVAKKHPKTWVHYIAAEEEDWDYAPLVLAPDDRSYKSQYLNNGPQRIGRKYKKVRFMAYTDETFKTREAIQHESGILGPLLYGEVGDTLLIIFKNQASRPYNIYPHGITDVRPLYSRRLPKGVKHLKDFPILPGEIFKYKWTVTVEDGPTKSDPRCLTRYYSSFVNMERDLASGLIGPLLICYKESVDQRGNQIMSDKRNVILFSVFDENRSWYLTENIQRFLPNPAGVQLEDPEFQASNIMHSINGYVFDSLQLSVCLHEVAYWYILSIGAQTDFLSVFFSGYTFKHKMVYEDTLTLFPFSGETVFMSMENPGLWILGCHNSDFRNRGMTALLKVSSCDKNTGDYYEDSYEDISAYLLSKNNAIEPRSFSQNGAPSPAGSPTSTEEGTSESATPESGPGSEPATSGSETPGTSESATPESGPGTSTEPSEGSAPGTSTEPSEGSAPGTSTEPSEGSAPGTSTEPSEGSAPGTSTEPSEGSAPGTSTEPSEGSAPGSPAGSPTSTEEGTSTEPSEGSAPGASSPPVLKRHQREITRTTLQSDQEEIDYDDTISVEMKKEDFDIYDEDENQSPRSFQKKTRHYFIAAVERLWDYGMSSSPHVLRNRAQSGSVPQFKKVVFQEFTDGSFTQPLYRGELNEHLGLLGPYIRAEVEDNIMVTFRNQASRPYSFYSSLISYEEDQRQGAEPRKNFVKPNETKTYFWKVQHHMAPTKDEFDCKAWAYFSDVDLEKDVHSGLIGPLLVCHTNTLNPAHGRQVTVQEFALFFTIFDETKSWYFTENMERNCRGAPTSESATPESGPGSEPATSGSETPGTSESATPESGPGSEPATSGSETPGTSESATPESGPGTSTEPSEGSAPGTSESATPESGPGSPAGSPTSTEEGSPAGSPTSTEEGSPAGSPTSTEEGTSESATPESGPGTSTEPSEGSAPGASSAPCNIQMEDPTFKENYRFHAINGYIMDTLPGLVMAQDQRIRWYLLSMGSNENIHSIHFSGHVFTVRKKEEYKMALYNLYPGVFETVEMLPSKAGIWRVECLIGEHLHAGMSTLFLVYSNKCQTPLGMASGHIRDFQITASGQYGQWAPKLARLHYSGSINAWSTKEPFSWIKVDLLAPMIIHGIKTQGARQKFSSLYISQFIIMYSLDGKKWQTYRGNSTGTLMVFFGNVDSSGIKHNIFNPPIIARYIRLHPTHYSIRSTLRMELMGCDLNSCSMPLGMESKAISDAQITASSYFTNMFATWSPSKARLHLQGRSNAWRPQVNNPKEWLQVDFQKTMKVTGVTTQGVKSLLTSMYVKEFLISSSQDGHQWTLFFQNGKVKVFQGNQDSFTPVVNSLDPPLLTRYLRIHPQSWVHQIALRMEVLGCEAQDLYGAPGTSESATPESGPGSEPATSGSETPGTSESATPESGPGSEPATSGSETPGTSESATPESGPGTSTEPSEGSAPGSPAGSPTSTEEGTSESATPESGPGSEPATSGSETPGTSESATPESGPGSPAGSPTSTEEGSPAGSPTSTEEGTSTEPSEGSAPGTSESATPESGPGTSESATPESGPGTSESATPESGPGSEPATSGSETPGSEPATSGSETPGSPAGSPTSTEEGTSTEPSEGSAPGTSTEPSEGSAPGSEPATSGSETPGTSESATPESGPGTSTEPSEGSAPASSEQKLISEEDLSPATGHHHHHH

SEQ ID NO: 1120 - DNA, 6162 bp, synthetic construct
  misc_feature 1..6162: note = Description of Artificial Sequence: Synthetic polynucleotide
  source 1..6162: mol_type = other DNA
gccaccagaagatactacctgggtgcagtggaactgtcatgggactatatgcaaagtgatctcggtgagctgcctgtggacgcaagatttcctcctagagtgccaaaatcttttccattcaacacctcagtcgtgtacaaaaagactctgtttgtagaattcacggatcaccttttcaacatcgctaagccaaggccaccctggatgggtctgctaggtcctaccatccaggctgaggtttatgatacagtggtcattacacttaagaacatggcttcccatcctgtcagtcttcatgctgttggtgtatcctactggaaagcttctgagggagctgaatatgatgatcagaccagtcaaagggagaaagaagatgataaagtcttccctggtggaagccatacatatgtctggcaggtcctgaaagagaatggtccaatggcctctgacccactgtgccttacctactcatatctttctcatgtggacctggtaaaagacttgaattcaggcctcattggagccctactagtatgtagagaagggagtctggccaaggaaaagacacagaccttgcacaaatttatactactttttgctgtatttgatgaagggaaaagttggcactcagaaacaaagaactccttgatgcaggatagggatgctgcatctgctcgggcctggcctaaaatgcacacagtcaatggttatgtaaacaggtctctgccaggtctgattggatgccacaggaaatcagtctattggcatgtgattggaatgggcaccactcctgaagtgcactcaatattcctcgaaggtcacacatttcttgtgaggaaccatcgccaggctagcttggaaatctcgccaataactttccttactgctcaaacactcttgatggaccttggacagtttctactgttttgtcatatctcttcccaccaacatgatggcatggaagcttatgtcaaagtagacagctgtccagaggaaccccaactacgaatgaaaaataatgaagaagcggaagactatgatgatgatcttactgattctgaaatggatgtggtcaggtttgatgatgacaactctccttcctttatccaaattcgctcagttgccaagaagcatcctaaaacttgggtacattacattgctgctgaagaggaggactgggactatgctcccttagtcctcgcccccgatgacagaagttataaaagtcaatatttgaacaatggccctcagcggattggtaggaagtacaaaaaagtccgatttatggcatacacagatgaaacctttaagactcgtgaagctattcagcatgaatcaggaatcttgggacctttactttatggggaagttggagacacactgttgattatatttaagaatcaagcaagcagaccatataacatctaccctcacggaatcactgatgtccgtcctttgtattcaaggagattaccaaaaggtgtaaaacatttgaaggattttccaattctgccaggagaaatattcaaatataaatggacagtgactgtagaagatgggccaactaaatcagatcctcggtgcctgacccgctattactctagtttcgttaatatggagagagatctagcttcaggactcattggccctctcctcatctgctacaaagaatctgtagatcaaagaggaaaccagataatgtcagacaagaggaatgtcatcctgttttctgtatttgatgagaaccgaagctggtacctcacagagaatatacaacgctttctccccaatccagctggagtgcagcttgaggatccagagttccaagcctccaacatcatgcacagcatcaatggctatgtttttgatagtttgcagttgtcagtttgtttgcatgaggtggcatactggtacattctaagcattggagcacagactgacttcctttctgtcttcttctctggatataccttcaaacacaaaatggtctatgaagacacactcaccctattcccattctcaggagaaactgtcttcatgtcgatggaaaacccaggtctatggattctggggtgccacaactcagactttcggaacagaggcatgaccgccttactgaaggtttctagttgtgacaagaacactggtgattattacgaggacagttatgaagatatttcagcatacttgctgagtaaaaacaatgccattgaaccaagaagcttctctcaaaacggcgcgccaagtcccgctggaagcccaactagcaccgaagaggggacctcagagtccgccacccccgagtccggccctggctctgagcctgccactagcggctccgagactcctggcacatccgaaagcgctacacccgagagtggacccggcacctctaccgagcccagtgagggctccgcccctggaacaagcaccgagcccagcgaaggcagcgccccagggacctccacagagcccagtgaaggcagtgctcctggcaccagcaccgaaccaagcgagggctctgcacccgggacctccaccgagccaagcgaaggctctgcccctggcacttccaccgagcccagcgaaggcagcgcccctgggagccccgctggctctcccaccagcactgaggagggcacatctaccgaaccaagtgaaggctctgcaccaggtgcctcgagcccaccagtcttgaaacgccatcaacgggaaataactcgtactactcttcagtcagatcaagaggaaatcgattatgatgataccatatcagttgaaatgaagaaggaagattttgacatttatgatgaggatgaaaatcagagcccccgcagctttcaaaagaaaacacgacactattttattgctgcagtggagaggctctgggattatgggatgagtagctccccacatgttctaagaaacagggctcagagtggcagtgtccctcagttcaagaaagttgttttccaggaatttactgatggctcctttactcagcccttataccgtggagaactaaatgaacatttgggactcctggggccatatataagagcagaagttgaagataatatcatggtaactttcagaaatcaggcctctcgtccctattccttctattctagccttatttcttatgaggaagatcagaggcaaggagcagaacctagaaaaaactttgtcaagcctaatgaaaccaaaacttacttttggaaagtgcaacatcatatggcacccactaaagatgagtttgactgcaaagcctgggcttatttctctgatgttgacctggaaaaagatgtgcactcaggcctgattggaccccttctggtctgccacactaacacactgaaccctgctcatgggagacaagtgacagtacaggaatttgctctgtttttcaccatctttgatgagaccaaaagctggtacttcactgaaaatatggaaagaaactgcaggggcgcgccaacgtccgaaagtgctacccctgagtcaggccctggtagtgagcctgccacaagcggaagcgaaactccggggacctcagagtctgccactcccgaatcggggccaggctctgaaccggccacttcagggagcgaaacaccaggaacatcggagagcgctaccccggagagcgggccaggaactagtactgagcctagcgagggaagtgcacctggtacaagcgagtccgccacacccgagtctggccctggctctccagcgggctcacccacgagcactgaagagggctctcccgctggcagcccaacgtcgacagaagaaggatcaccagcaggctcccccacatcaacagaggagggtacatcagaatctgctactcccgagagtggacccggtacctccactgagcccagcgaggggagtgcaccaggtgcctcgagcgctccctgcaatatccagatggaagatcccacttttaaagagaattatcgcttccatgcaatcaatggctacataatggatacactacctggcttagtaatggctcaggatcaaaggattcgatggtatctgctcagcatgggcagcaatgaaaacatccattctattcatttcagtggacatgtgttcactgtacgaaaaaaagaggagtataaaatggcactgtacaatctctatccaggtgtttttgagacagtggaaatgttaccatccaaagctggaatttggcgggtggaatgccttattggcgagcatctacatgctgggatgagcacactttttctggtgtacagcaataagtgtcagactcccctgggaatggcttctggacacattagagattttcagattacagcttcaggacaatatggacagtgggccccaaagctggccagacttcattattccggatcaatcaatgcctggagcaccaaggagcccttttcttggatcaaggtggatctgttggcaccaatgattattcacggcatcaagacccagggtgcccgtcagaagttctccagcctctacatctctcagtttatcatcatgtatagtcttgatgggaagaagtggcagacttatcgaggaaattccactggaaccttaatggtcttctttggcaatgtggattcatctgggataaaacacaatatttttaaccctccaattattgctcgatacatccgtttgcacccaactcattatagcattcgcagcactcttcgcatggagttgatgggctgtgatttaaatagttgcagcatgccattgggaatggagagtaaagcaatatcagatgcacagattactgcttcatcctactttaccaatatgtttgccacctggtctccttcaaaagctcgacttcacctccaagggaggagtaatgcctggagacctcaggtgaataatccaaaagagtggctgcaagtggacttccagaagacaatgaaagtcacaggagtaactactcagggagtaaaatctctgcttaccagcatgtatgtgaaggagttcctcatctccagcagtcaagatggccatcagtggactctcttttttcagaatggcaaagtaaaggtttttcagggaaatcaagactccttcacacctgtggtgaactctctagacccaccgttactgactcgctaccttcgaattcacccccagagttgggtgcaccagattgccctgaggatggaggttctgggctgcgaggcacaggacctctacggcgcgccaggtacctcagagtctgctacccccgagtcagggccaggatcagagccagccacctccgggtctgagacacccgggacttccgagagtgccacccctgagtccggacccgggtccgagcccgccacttccggctccgaaactcccggcacaagcgagagcgctaccccagagtcaggaccaggaacatctacagagccctctgaaggctccgctccagggtccccagccggcagtcccactagcaccgaggagggaacctctgaaagcgccacacccgaatcagggccagggtctgagcctgctaccagcggcagcgagacaccaggcacctctgagtccgccacaccagagtccggacccggatctcccgctgggagccccacctccactgaggagggatctcctgctggctctccaacatctactgaggaaggtacctcaaccgagccatccgagggatcagctcccggcacctcagagtcggcaaccccggagtctggacccggaacttccgaaagtgccacaccagagtccggtcccgggacttcagaatcagcaacacccgagtccggccctgggtctgaacccgccacaagtggtagtgagacaccaggatcagaacctgctacctcagggtcagagacacccggatctccggcaggctcaccaacctccactgaggagggcaccagcacagaaccaagcgagggctccgcacccggaacaagcactgaacccagtgagggttcagcacccggctctgagccggccacaagtggcagtgagacacccggcacttcagagagtgccacccccgagagtggcccaggcactagtaccgagccctctgaaggcagtgcgccagcctcgagcgaacaaaaactcatctcagaagaggatctgtcacctgcaaccggtcatcatcaccatcaccattga

SEQ ID NO: 1121 - protein, 2053 aa, synthetic construct
  REGION 1..2053: note = Description of Artificial Sequence: Synthetic polypeptide
ATRRYYLGAVELSWDYMQSDLGELPVDARFPPRVPKSFPFNTSVVYKKTLFVEFTDHLFNIAKPRPPWMGLLGPTIQAEVYDTVVITLKNMASHPVSLHAVGVSYWKASEGAEYDDQTSQREKEDDKVFPGGSHTYVWQVLKENGPMASDPLCLTYSYLSHVDLVKDLNSGLIGALLVCREGSLAKEKTQTLHKFILLFAVFDEGKSWHSETKNSLMQDRDAASARAWPKMHTVNGYVNRSLPGLIGCHRKSVYWHVIGMGTTPEVHSIFLEGHTFLVRNHRQASLEISPITFLTAQTLLMDLGQFLLFCHISSHQHDGMEAYVKVDSCPEEPQLRMKNNEEAEDYDDDLTDSEMDVVRFDDDNSPSFIQIRSVAKKHPKTWVHYIAAEEEDWDYAPLVLAPDDRSYKSQYLNNGPQRIGRKYKKVRFMAYTDETFKTREAIQHESGILGPLLYGEVGDTLLIIFKNQASRPYNIYPHGITDVRPLYSRRLPKGVKHLKDFPILPGEIFKYKWTVTVEDGPTKSDPRCLTRYYSSFVNMERDLASGLIGPLLICYKESVDQRGNQIMSDKRNVILFSVFDENRSWYLTENIQRFLPNPAGVQLEDPEFQASNIMHSINGYVFDSLQLSVCLHEVAYWYILSIGAQTDFLSVFFSGYTFKHKMVYEDTLTLFPFSGETVFMSMENPGLWILGCHNSDFRNRGMTALLKVSSCDKNTGDYYEDSYEDISAYLLSKNNAIEPRSFSQNGAPSPAGSPTSTEEGTSESATPESGPGSEPATSGSETPGTSESATPESGPGTSTEPSEGSAPGTSTEPSEGSAPGTSTEPSEGSAPGTSTEPSEGSAPGTSTEPSEGSAPGTSTEPSEGSAPGSPAGSPTSTEEGTSTEPSEGSAPGASSPPVLKRHQREITRTTLQSDQEEIDYDDTISVEMKKEDFDIYDEDENQSPRSFQKKTRHYFIAAVERLWDYGMSSSPHVLRNRAQSGSVPQFKKVVFQEFTDGSFTQPLYRGELNEHLGLLGPYIRAEVEDNIMVTFRNQASRPYSFYSSLISYEEDQRQGAEPRKNFVKPNETKTYFWKVQHHMAPTKDEFDCKAWAYFSDVDLEKDVHSGLIGPLLVCHTNTLNPAHGRQVTVQEFALFFTIFDETKSWYFTENMERNCRAPCNIQMEDPGAPGTPGSGTASSSPGASPGTSSTGSPGASPGTSSTGSPGASPGTSSTGSPGSSPSASTGTGPGTPGSGTASSSPGASPGTSSTGSPGASPGTSSTGSPGASPGTSSTGSPGSSTPSGATGSPGSSTPSGATGSPGASPGTSSTGSPASSTFKENYRFHAINGYIMDTLPGLVMAQDQRIRWYLLSMGSNENIHSIHFSGHVFTVRKKEEYKMALYNLYPGVFETVEMLPSKAGIWRVECLIGEHLHAGMSTLFLVYSNKCQTPLGMASGHIRDFQITASGQYGQWAPKLARLHYSGSINAWSTKEPFSWIKVDLLAPMIIHGIKTQGARQKFSSLYISQFIIMYSLDGKKWQTYRGNSTGTLMVFFGNVDSSGIKHNIFNPPIIARYIRLHPTHYSIRSTLRMELMGCDLNSCSMPLGMESKAISDAQITASSYFTNMFATWSPSKARLHLQGRSNAWRPQVNNPKEWLQVDFQKTMKVTGVTTQGVKSLLTSMYVKEFLISSSQDGHQWTLFFQNGKVKVFQGNQDSFTPVVNSLDPPLLTRYLRIHPQSWVHQIALRMEVLGCEAQDLYGAPGTSESATPESGPGSEPATSGSETPGTSESATPESGPGSEPATSGSETPGTSESATPESGPGTSTEPSEGSAPGSPAGSPTSTEEGTSESATPESGPGSEPATSGSETPGTSESATPESGPGSPAGSPTSTEEGSPAGSPTSTEEGTSTEPSEGSAPGTSESATPESGPGTSESATPESGPGTSESATPESGPGSEPATSGSETPGSEPATSGSETPGSPAGSPTSTEEGTSTEPSEGSAPGTSTEPSEGSAPGSEPATSGSETPGTSESATPESGPGTSTEPSEGSAPASSEQKLISEEDLSPATGHHHHHH

SEQ ID NO: 1122 - DNA, 6162 bp, synthetic construct
  misc_feature 1..6162: note = Description of Artificial Sequence: Synthetic polynucleotide
  source 1..6162: mol_type = other DNA
gccaccagaagatactacctgggtgcagtggaactgtcatgggactatatgcaaagtgatctcggtgagctgcctgtggacgcaagatttcctcctagagtgccaaaatcttttccattcaacacctcagtcgtgtacaaaaagactctgtttgtagaattcacggatcaccttttcaacatcgctaagccaaggccaccctggatgggtctgctaggtcctaccatccaggctgaggtttatgatacagtggtcattacacttaagaacatggcttcccatcctgtcagtcttcatgctgttggtgtatcctactggaaagcttctgagggagctgaatatgatgatcagaccagtcaaagggagaaagaagatgataaagtcttccctggtggaagccatacatatgtctggcaggtcctgaaagagaatggtccaatggcctctgacccactgtgccttacctactcatatctttctcatgtggacctggtaaaagacttgaattcaggcctcattggagccctactagtatgtagagaagggagtctggccaaggaaaagacacagaccttgcacaaatttatactactttttgctgtatttgatgaagggaaaagttggcactcagaaacaaagaactccttgatgcaggatagggatgctgcatctgctcgggcctggcctaaaatgcacacagtcaatggttatgtaaacaggtctctgccaggtctgattggatgccacaggaaatcagtctattggcatgtgattggaatgggcaccactcctgaagtgcactcaatattcctcgaaggtcacacatttcttgtgaggaaccatcgccaggctagcttggaaatctcgccaataactttccttactgctcaaacactcttgatggaccttggacagtttctactgttttgtcatatctcttcccaccaacatgatggcatggaagcttatgtcaaagtagacagctgtccagaggaaccccaactacgaatgaaaaataatgaagaagcggaagactatgatgatgatcttactgattctgaaatggatgtggtcaggtttgatgatgacaactctccttcctttatccaaattcgctcagttgccaagaagcatcctaaaacttgggtacattacattgctgctgaagaggaggactgggactatgctcccttagtcctcgcccccgatgacagaagttataaaagtcaatatttgaacaatggccctcagcggattggtaggaagtacaaaaaagtccgatttatggcatacacagatgaaacctttaagactcgtgaagctattcagcatgaatcaggaatcttgggacctttactttatggggaagttggagacacactgttgattatatttaagaatcaagcaagcagaccatataacatctaccctcacggaatcactgatgtccgtcctttgtattcaaggagattaccaaaaggtgtaaaacatttgaaggattttccaattctgccaggagaaatattcaaatataaatggacagtgactgtagaagatgggccaactaaatcagatcctcggtgcctgacccgctattactctagtttcgttaatatggagagagatctagcttcaggactcattggccctctcctcatctgctacaaagaatctgtagatcaaagaggaaaccagataatgtcagacaagaggaatgtcatcctgttttctgtatttgatgagaaccgaagctggtacctcacagagaatatacaacgctttctccccaatccagctggagtgcagcttgaggatccagagttccaagcctccaacatcatgcacagcatcaatggctatgtttttgatagtttgcagttgtcagtttgtttgcatgaggtggcatactggtacattctaagcattggagcacagactgacttcctttctgtcttcttctctggatataccttcaaacacaaaatggtctatgaagacacactcaccctattcccattctcaggagaaactgtcttcatgtcgatggaaaacccaggtctatggattctggggtgccacaactcagactttcggaacagaggcatgaccgccttactgaaggtttctagttgtgacaagaacactggtgattattacgaggacagttatgaagatatttcagcatacttgctgagtaaaaacaatgccattgaaccaagaagcttctctcaaaacggcgcgccaagtcccgctggaagcccaactagcaccgaagaggggacctcagagtccgccacccccgagtccggccctggctctgagcctgccactagcggctccgagactcctggcacatccgaaagcgctacacccgagagtggacccggcacctctaccgagcccagtgagggctccgcccctggaacaagcaccgagcccagcgaaggcagcgccccagggacctccacagagcccagtgaaggcagtgctcctggcaccagcaccgaaccaagcgagggctctgcacccgggacctccaccgagccaagcgaaggctctgcccctggcacttccaccgagcccagcgaaggcagcgcccctgggagccccgctggctctcccaccagcactgaggagggcacatctaccgaaccaagtgaaggctctgcaccaggtgcctcgagcccaccagtcttgaaacgccatcaacgggaaataactcgtactactcttcagtcagatcaagaggaaatcgattatgatgataccatatcagttgaaatgaagaaggaagattttgacatttatgatgaggatgaaaatcagagcccccgcagctttcaaaagaaaacacgacactattttattgctgcagtggagaggctctgggattatgggatgagtagctccccacatgttctaagaaacagggctcagagtggcagtgtccctcagttcaagaaagttgttttccaggaatttactgatggctcctttactcagcccttataccgtggagaactaaatgaacatttgggactcctggggccatatataagagcagaagttgaagataatatcatggtaactttcagaaatcaggcctctcgtccctattccttctattctagccttatttcttatgaggaagatcagaggcaaggagcagaacctagaaaaaactttgtcaagcctaatgaaaccaaaacttacttttggaaagtgcaacatcatatggcacccactaaagatgagtttgactgcaaagcctgggcttatttctctgatgttgacctggaaaaagatgtgcactcaggcctgattggaccccttctggtctgccacactaacacactgaaccctgctcatgggagacaagtgacagtacaggaatttgctctgtttttcaccatctttgatgagaccaaaagctggtacttcactgaaaatatggaaagaaactgcagggctccctgcaatatccagatggaagatcccggcgcgccaggtacacccggatcgggtacagcgtcatcgagccccggtgcgtcacctggtacgtcgagcacggggtcgccaggggcgtcccctgggacgtcctcaacaggctcgcccggtgcgtcacccggcacgtcgtccacgggttcacctggtagctccccttccgcgtccactggcaccgggcctggaactccggggagcggcacagcgagctcgtcgccgggagcatcgcctgggacatcgagcaccgggtcgccaggagcatcgcccggaacatccagcacaggaagccccggcgcgtcgcccgggacatcaagcacaggttccccgggatcgagcacgccgtccggagccactggatcaccagggagctcgacaccttccggcgcaacgggatcgcccggagccagcccgggtacgtcaagcactggctcccctgcctcgagcacttttaaagagaattatcgcttccatgcaatcaatggctacataatggatacactacctggcttagtaatggctcaggatcaaaggattcgatggtatctgctcagcatgggcagcaatgaaaacatccattctattcatttcagtggacatgtgttcactgtacgaaaaaaagaggagtataaaatggcactgtacaatctctatccaggtgtttttgagacagtggaaatgttaccatccaaagctggaatttggcgggtggaatgccttattggcgagcatctacatgctgggatgagcacactttttctggtgtacagcaataagtgtcagactcccctgggaatggcttctggacacattagagattttcagattacagcttcaggacaatatggacagtgggccccaaagctggccagacttcattattccggatcaatcaatgcctggagcaccaaggagcccttttcttggatcaaggtggatctgttggcaccaatgattattcacggcatcaagacccagggtgcccgtcagaagttctccagcctctacatctctcagtttatcatcatgtatagtcttgatgggaagaagtggcagacttatcgaggaaattccactggaaccttaatggtcttctttggcaatgtggattcatctgggataaaacacaatatttttaaccctccaattattgctcgatacatccgtttgcacccaactcattatagcattcgcagcactcttcgcatggagttgatgggctgtgatttaaatagttgcagcatgccattgggaatggagagtaaagcaatatcagatgcacagattactgcttcatcctactttaccaatatgtttgccacctggtctccttcaaaagctcgacttcacctccaagggaggagtaatgcctggagacctcaggtgaataatccaaaagagtggctgcaagtggacttccagaagacaatgaaagtcacaggagtaactactcagggagtaaaatctctgcttaccagcatgtatgtgaaggagttcctcatctccagcagtcaagatggccatcagtggactctcttttttcagaatggcaaagtaaaggtttttcagggaaatcaagactccttcacacctgtggtgaactctctagacccaccgttactgactcgctaccttcgaattcacccccagagttgggtgcaccagattgccctgaggatggaggttctgggctgcgaggcacaggacctctacggcgcgccaggtacctcagagtctgctacccccgagtcagggccaggatcagagccagccacctccgggtctgagacacccgggacttccgagagtgccacccctgagtccggacccgggtccgagcccgccacttccggctccgaaactcccggcacaagcgagagcgctaccccagagtcaggaccaggaacatctacagagccctctgaaggctccgctccagggtccccagccggcagtcccactagcaccgaggagggaacctctgaaagcgccacacccgaatcagggccagggtctgagcctgctaccagcggcagcgagacaccaggcacctctgagtccgccacaccagagtccggacccggatctcccgctgggagccccacctccactgaggagggatctcctgctggctctccaacatctactgaggaaggtacctcaaccgagccatccgagggatcagctcccggcacctcagagtcggcaaccccggagtctggacccggaacttccgaaagtgccacaccagagtccggtcccgggacttcagaatcagcaacacccgagtccggccctgggtctgaacccgccacaagtggtagtgagacaccaggatcagaacctgctacctcagggtcagagacacccggatctccggcaggctcaccaacctccactgaggagggcaccagcacagaaccaagcgagggctccgcacccggaacaagcactgaacccagtgagggttcagcacccggctctgagccggccacaagtggcagtgagacacccggcacttcagagagtgccacccccgagagtggcccaggcactagtaccgagccctctgaaggcagtgcgccagcctcgagcgaacaaaaactcatctcagaagaggatctgtcacctgcaaccggtcatcatcaccatcaccattga

SEQ ID NO: 1123 - protein, 1619 aa, synthetic construct
  REGION 1..1619: note = Description of Artificial Sequence: Synthetic polypeptide
ATRRYYLGAVELSWDYMQSDLGELPVDARFPPRVPKSFPFNTSVVYKKTLFVEFTDHLFNIAKPRPPWMGLLGPTIQAEVYDTVVITLKNMASHPVSLHAVGVSYWKASEGAEYDDQTSQREKEDDKVFPGGSHTYVWQVLKENGPMASDPLCLTYSYLSHVDLVKDLNSGLIGALLVCREGSLAKEKTQTLHKFILLFAVFDEGKSWHSETKNSLMQDRDAASARAWPKMHTVNGYVNRSLPGLIGCHRKSVYWHVIGMGTTPEVHSIFLEGHTFLVRNHRQASLEISPITFLTAQTLLMDLGQFLLFCHISSHQHDGMEAYVKVDSCPEEPQLRMKNNEEAEDYDDDLTDSEMDVVRFDDDNSPSFIQIRSVAKKHPKTWVHYIAAEEEDWDYAPLVLAPDDRSYKSQYLNNGPQRIGRKYKKVRFMAYTDETFKTREAIQHESGILGPLLYGEVGDTLLIIFKNQASRPYNIYPHGITDVRPLYSRRLPKGVKHLKDFPILPGEIFKYKWTVTVEDGPTKSDPRCLTRYYSSFVNMERDLASGLIGPLLICYKESVDQRGNQIMSDKRNVILFSVFDENRSWYLTENIQRFLPNPAGVQLEDPEFQASNIMHSINGYVFDSLQLSVCLHEVAYWYILSIGAQTDFLSVFFSGYTFKHKMVYEDTLTLFPFSGETVFMSMENPGLWILGCHNSDFRNRGMTALLKVSSCDKNTGDYYEDSYEDISAYLLSKNNAIEPRSFSQNPPVLKRHQREITRTTLQGAPTSTEPSEGSAPGSPAGSPTSTEEGTSTEPSEGSAPGTSTEPSEGSAPGTSESATPESGPGTSTEPSEGSAPGTSESATPESGPGSEPATSGSETPGTSTEPSEGSAPGTSTEPSEGSAPGTSESATPESGPGTSESATPESGPGASSSDQEEIDYDDTISVEMKKEDFDIYDEDENQSPRSFQKKTRHYFIAAVERLWDYGMSSSPHVLRNRAQSGSVPQFKKVVFQEFTDGSFTQPLYRGELNEHLGLLGPYIRAEVEDNIMVTFRNQASRPYSFYSSLISYEEDQRQGAEPRKNFVKPNETKTYFWKVQHHMAPTKDEFDCKAWAYFSDVDLEKDVHSGLIGPLLVCHTNTLNPAHGRQVTVQEFALFFTIFDETKSWYFTENMERNCRAPCNIQMEDPTFKENYRFHAINGYIMDTLPGLVMAQDQRIRWYLLSMGSNENIHSIHFSGHVFTVRKKEEYKMALYNLYPGVFETVEMLPSKAGIWRVECLIGEHLHAGMSTLFLVYSNKCQTPLGMASGHIRDFQITASGQYGQWAPKLARLHYSGSINAWSTKEPFSWIKVDLLAPMIIHGIKTQGARQKFSSLYISQFIIMYSLDGKKWQTYRGNSTGTLMVFFGNVDSSGIKHNIFNPPIIARYIRLHPTHYSIRSTLRMELMGCDLNSCSMPLGMESKAISDAQITASSYFTNMFATWSPSKARLHLQGRSNAWRPQVNNPKEWLQVDFQKTMKVTGVTTQGVKSLLTSMYVKEFLISSSQDGHQWTLFFQNGKVKVFQGNQDSFTPVVNSLDPPLLTRYLRIHPQSWVHQIALRMEVLGCEAQDLYGAGSPGAETAEQKLISEEDLSPATGHHHHHH

SEQ ID NO: 1124 - DNA, 4860 bp, synthetic construct
  misc_feature 1..4860: note = Description of Artificial Sequence: Synthetic polynucleotide
  source 1..4860: mol_type = other DNA
gccaccagaagatactacctgggtgcagtggaactgtcatgggactatatgcaaagtgatctcggtgagctgcctgtggacgcaagatttcctcctagagtgccaaaatcttttccattcaacacctcagtcgtgtacaaaaagactctgtttgtagaattcacggatcaccttttcaacatcgctaagccaaggccaccctggatgggtctgctaggtcctaccatccaggctgaggtttatgatacagtggtcattacacttaagaacatggcttcccatcctgtcagtcttcatgctgttggtgtatcctactggaaagcttctgagggagctgaatatgatgatcagaccagtcaaagggagaaagaagatgataaagtcttccctggtggaagccatacatatgtctggcaggtcctgaaagagaatggtccaatggcctctgacccactgtgccttacctactcatatctttctcatgtggacctggtaaaagacttgaattcaggcctcattggagccctactagtatgtagagaagggagtctggccaaggaaaagacacagaccttgcacaaatttatactactttttgctgtatttgatgaagggaaaagttggcactcagaaacaaagaactccttgatgcaggatagggatgctgcatctgctcgggcctggcctaaaatgcacacagtcaatggttatgtaaacaggtctctgccaggtctgattggatgccacaggaaatcagtctattggcatgtgattggaatgggcaccactcctgaagtgcactcaatattcctcgaaggtcacacatttcttgtgaggaaccatcgccaggctagcttggaaatctcgccaataactttccttactgctcaaacactcttgatggaccttggacagtttctactgttttgtcatatctcttcccaccaacatgatggcatggaagcttatgtcaaagtagacagctgtccagaggaaccccaactacgaatgaaaaataatgaagaagcggaagactatgatgatgatcttactgattctgaaatggatgtggtcaggtttgatgatgacaactctccttcctttatccaaattcgctcagttgccaagaagcatcctaaaacttgggtacattacattgctgctgaagaggaggactgggactatgctcccttagtcctcgcccccgatgacagaagttataaaagtcaatatttgaacaatggccctcagcggattggtaggaagtacaaaaaagtccgatttatggcatacacagatgaaacctttaagactcgtgaagctattcagcatgaatcaggaatcttgggacctttactttatggggaagttggagacacactgttgattatatttaagaatcaagcaagcagaccatataacatctaccctcacggaatcactgatgtccgtcctttgtattcaaggagattaccaaaaggtgtaaaacatttgaaggattttccaattctgccaggagaaatattcaaatataaatggacagtgactgtagaagatgggccaactaaatcagatcctcggtgcctgacccgctattactctagtttcgttaatatggagagagatctagcttcaggactcattggccctctcctcatctgctacaaagaatctgtagatcaaagaggaaaccagataatgtcagacaagaggaatgtcatcctgttttctgtatttgatgagaaccgaagctggtacctcacagagaatatacaacgctttctccccaatccagctggagtgcagcttgaggatccagagttccaagcctccaacatcatgcacagcatcaatggctatgtttttgatagtttgcagttgtcagtttgtttgcatgaggtggcatactggtacattctaagcattggagcacagactgacttcctttctgtcttcttctctggatataccttcaaacacaaaatggtctatgaagacacactcaccctattcccattctcaggagaaactgtcttcatgtcgatggaaaacccaggtctatggattctggggtgccacaactcagactttcggaacagaggcatgaccgccttactgaaggtttctagttgtgacaagaacactggtgattattacgaggacagttatgaagatatttcagcatacttgctgagtaaaaacaatgccattgaaccaagaagcttctctcaaaacccaccagtcttgaaacgccatcaacgggaaataactcgtactactcttcagggcgcgccaacaagcaccgaacctagcgagggcagcgctcccggcagccctgccggcagcccaacctcaactgaggagggcaccagtactgagcccagcgagggatcagcacctggcaccagcaccgaacctagcgaggggagcgcccctgggactagcgagtcagctacaccagagagcgggcctggaacttctaccgaacccagtgagggatccgctccaggcacctccgaatccgcaacccccgaatccggacctggctcagagcccgccaccagcgggagcgaaacccctggcacatccaccgagcctagcgaagggtccgcacccggcaccagtacagagcctagcgagggatcagcacctggcaccagtgaatctgctacaccagagagcggccctggaacctccgagtccgctacccccgagagcgggccaggtgcctcgagctcagatcaagaggaaatcgattatgatgataccatatcagttgaaatgaagaaggaagattttgacatttatgatgaggatgaaaatcagagcccccgcagctttcaaaagaaaacacgacactattttattgctgcagtggagaggctctgggattatgggatgagtagctccccacatgttctaagaaacagggctcagagtggcagtgtccctcagttcaagaaagttgttttccaggaatttactgatggctcctttactcagcccttataccgtggagaactaaatgaacatttgggactcctggggccatatataagagcagaagttgaagataatatcatggtaactttcagaaatcaggcctctcgtccctattccttctattctagccttatttcttatgaggaagatcagaggcaaggagcagaacctagaaaaaactttgtcaagcctaatgaaaccaaaacttacttttggaaagtgcaacatcatatggcacccactaaagatgagtttgactgcaaagcctgggcttatttctctgatgttgacctggaaaaagatgtgcactcaggcctgattggaccccttctggtctgccacactaacacactgaaccctgctcatgggagacaagtgacagtacaggaatttgctctgtttttcaccatctttgatgagaccaaaagctggtacttcactgaaaatatggaaagaaactgcagggctccctgcaatatccagatggaagatcccacttttaaagagaattatcgcttccatgcaatcaatggctacataatggatacactacctggcttagtaatggctcaggatcaaaggattcgatggtatctgctcagcatgggcagcaatgaaaacatccattctattcatttcagtggacatgtgttcactgtacgaaaaaaagaggagtataaaatggcactgtacaatctctatccaggtgtttttgagacagtggaaatgttaccatccaaagctggaatttggcgggtggaatgccttattggcgagcatctacatgctgggatgagcacactttttctggtgtacagcaataagtgtcagactcccctgggaatggcttctggacacattagagattttcagattacagcttcaggacaatatggacagtgggccccaaagctggccagacttcattattccggatcaatcaatgcctggagcaccaaggagcccttttcttggatcaaggtggatctgttggcaccaatgattattcacggcatcaagacccagggtgcccgtcagaagttctccagcctctacatctctcagtttatcatcatgtatagtcttgatgggaagaagtggcagacttatcgaggaaattccactggaaccttaatggtcttctttggcaatgtggattcatctgggataaaacacaatatttttaaccctccaattattgctcgatacatccgtttgcacccaactcattatagcattcgcagcactcttcgcatggagttgatgggctgtgatttaaatagttgcagcatgccattgggaatggagagtaaagcaatatcagatgcacagattactgcttcatcctactttaccaatatgtttgccacctggtctccttcaaaagctcgacttcacctccaagggaggagtaatgcctggagacctcaggtgaataatccaaaagagtggctgcaagtggacttccagaagacaatgaaagtcacaggagtaactactcagggagtaaaatctctgcttaccagcatgtatgtgaaggagttcctcatctccagcagtcaagatggccatcagtggactctcttttttcagaatggcaaagtaaaggtttttcagggaaatcaagactccttcacacctgtggtgaactctctagacccaccgttactgactcgctaccttcgaattcacccccagagttgggtgcaccagattgccctgaggatggaggttctgggctgcgaggcacaggacctctacggcgccggatcacctggggccgaaacggccgaacaaaaactcatctcagaagaggatctgtcacctgcaaccggtcatcatcaccatcaccattga

SEQ ID NO: 1125 - protein, 1619 aa, synthetic construct
  REGION 1..1619: note = Description of Artificial Sequence: Synthetic polypeptide
ATRRYYLGAVELSWDYMQSDLGELPVDARFPPRVPKSFPFNTSVVYKKTLFVEFTDHLFNIAKPRPPWMGLLGPTIQAEVYDTVVITLKNMASHPVSLHAVGVSYWKASEGAEYDDQTSQREKEDDKVFPGGSHTYVWQVLKENGPMASDPLCLTYSYLSHVDLVKDLNSGLIGALLVCREGSLAKEKTQTLHKFILLFAVFDEGKSWHSETKNSLMQDRDAASARAWPKMHTVNGYVNRSLPGLIGCHRKSVYWHVIGMGTTPEVHSIFLEGHTFLVRNHRQASLEISPITFLTAQTLLMDLGQFLLFCHISSHQHDGMEAYVKVDSCPEEPQLRMKNNEEAEDYDDDLTDSEMDVVRFDDDNSPSFIQIRSVAKKHPKTWVHYIAAEEEDWDYAPLVLAPDDRSYKSQYLNNGPQRIGRKYKKVRFMAYTDETFKTREAIQHESGILGPLLYGEVGDTLLIIFKNQASRPYNIYPHGITDVRPLYSRRLPKGVKHLKDFPILPGEIFKYKWTVTVEDGPTKSDPRCLTRYYSSFVNMERDLASGLIGPLLICYKESVDQRGNQIMSDKRNVILFSVFDENRSWYLTENIQRFLPNPAGVQLEDPEFQASNIMHSINGYVFDSLQLSVCLHEVAYWYILSIGAQTDFLSVFFSGYTFKHKMVYEDTLTLFPFSGETVFMSMENPGLWILGCHNSDFRNRGMTALLKVSSCDKNTGDYYEDSYEDISAYLLSKNNAIEPRSFSQNPPVLKRHQREITRTTLQSDQEEIDYDDTISVEMKKEDFDIYDEDENQSPRSFQKKTRHYFIAAVERLWDYGMSSSPHVLRNRAQSGSVPQFKKVVFQEFTDGSFTQPLYRGELNEHLGLLGPYIRAEVEDNIMVTFRNQASRPYSFYSSLISYEEDQRQGAEPRKNFVKPNETKTYFWKVQHHMAPTKDEFDCKAWAYFSDVDLEKDVHSGLIGPLLVCHTNTLNPAHGRQVTVQEFALFFTIFDETKSWYFTENMERNCRAPCNIGAPSPAGSPTSTEEGTSESATPESGPGTSTEPSEGSAPGSPAGSPTSTEEGTSTEPSEGSAPGTSTEPSEGSAPGTSESATPESGPGSEPATSGSETPGSEPATSGSETPGSPAGSPTSTEEGTSESATPESGPGTSTEPSEGSAPGASSQMEDPTFKENYRFHAINGYIMDTLPGLVMAQDQRIRWYLLSMGSNENIHSIHFSGHVFTVRKKEEYKMALYNLYPGVFETVEMLPSKAGIWRVECLIGEHLHAGMSTLFLVYSNKCQTPLGMASGHIRDFQITASGQYGQWAPKLARLHYSGSINAWSTKEPFSWIKVDLLAPMIIHGIKTQGARQKFSSLYISQFIIMYSLDGKKWQTYRGNSTGTLMVFFGNVDSSGIKHNIFNPPIIARYIRLHPTHYSIRSTLRMELMGCDLNSCSMPLGMESKAISDAQITASSYFTNMFATWSPSKARLHLQGRSNAWRPQVNNPKEWLQVDFQKTMKVTGVTTQGVKSLLTSMYVKEFLISSSQDGHQWTLFFQNGKVKVFQGNQDSFTPVVNSLDPPLLTRYLRIHPQSWVHQIALRMEVLGCEAQDLYGAGSPGAETAEQKLISEEDLSPATGHHHHHH

SEQ ID NO: 1126 - DNA, 4860 bp, synthetic construct
  misc_feature 1..4860: note = Description of Artificial Sequence: Synthetic polynucleotide
  source 1..4860: mol_type = other DNA
gccaccagaagatactacctgggtgcagtggaactgtcatgggactatatgcaaagtgatctcggtgagctgcctgtggacgcaagatttcctcctagagtgccaaaatcttttccattcaacacctcagtcgtgtacaaaaagactctgtttgtagaattcacggatcaccttttcaacatcgctaagccaaggccaccctggatgggtctgctaggtcctaccatccaggctgaggtttatgatacagtggtcattacacttaagaacatggcttcccatcctgtcagtcttcatgctgttggtgtatcctactggaaagcttctgagggagctgaatatgatgatcagaccagtcaaagggagaaagaagatgataaagtcttccctggtggaagccatacatatgtctggcaggtcctgaaagagaatggtccaatggcctctgacccactgtgccttacctactcatatctttctcatgtggacctggtaaaagacttgaattcaggcctcattggagccctactagtatgtagagaagggagtctggccaaggaaaagacacagaccttgcacaaatttatactactttttgctgtatttgatgaagggaaaagttggcactcagaaacaaagaactccttgatgcaggatagggatgctgcatctgctcgggcctggcctaaaatgcacacagtcaatggttatgtaaacaggtctctgccaggtctgattggatgccacaggaaatcagtctattggcatgtgattggaatgggcaccactcctgaagtgcactcaatattcctcgaaggtcacacatttcttgtgaggaaccatcgccaggctagcttggaaatctcgccaataactttccttactgctcaaacactcttgatggaccttggacagtttctactgttttgtcatatctcttcccaccaacatgatggcatggaagcttatgtcaaagtagacagctgtccagaggaaccccaactacgaatgaaaaataatgaagaagcggaagactatgatgatgatcttactgattctgaaatggatgtggtcaggtttgatgatgacaactctccttcctttatccaaattcgctcagttgccaagaagcatcctaaaacttgggtacattacattgctgctgaagaggaggactgggactatgctcccttagtcctcgcccccgatgacagaagttataaaagtcaatatttgaacaatggccctcagcggattggtaggaagtacaaaaaagtccgatttatggcatacacagatgaaacctttaagactcgtgaagctattcagcatgaatcaggaatcttgggacctttactttatggggaagttggagacacactgttgattatatttaagaatcaagcaagcagaccatataacatctaccctcacggaatcactgatgtccgtcctttgtattcaaggagattaccaaaaggtgtaaaacatttgaaggattttccaattctgccaggagaaatattcaaatataaatggacagtgactgtagaagatgggccaactaaatcagatcctcggtgcctgacccgctattactctagtttcgttaatatggagagagatctagcttcaggactcattggccctctcctcatctgctacaaagaatctgtagatcaaagaggaaaccagataatgtcagacaagaggaatgtcatcctgttttctgtatttgatgagaaccgaagctggtacctcacagagaatatacaacgctttctccccaatccagctggagtgcagcttgaggatccagagttccaagcctccaacatcatgcacagcatcaatggctatgtttttgatagtttgcagttgtcagtttgtttgcatgaggtggcatactggtacattctaagcattggagcacagactgacttcctttctgtcttcttctctggatataccttcaaacacaaaatggtctatgaagacacactcaccctattcccattctcaggagaaactgtcttcatgtcgatggaaaacccaggtctatggattctggggtgccacaactcagactttcggaacagaggcatgaccgccttactgaaggtttctagttgtgacaagaacactggtgattattacgaggacagttatgaagatatttcagcatacttgctgagtaaaaacaatgccattgaaccaagaagcttctctcaaaacccaccagtcttgaaacgccatcaacgggaaataactcgtactactcttcagtcagatcaagaggaaatcgattatgatgataccatatcagttgaaatgaagaaggaagattttgacatttatgatgaggatgaaaatcagagcccccgcagctttcaaaagaaaacacgacactattttattgctgcagtggagaggctctgggattatgggatgagtagctccccacatgttctaagaaacagggctcagagtggcagtgtccctcagttcaagaaagttgttttccaggaatttactgatggctcctttactcagcccttataccgtggagaactaaatgaacatttgggactcctggggccatatataagagcagaagttgaagataatatcatggtaactttcagaaatcaggcctctcgtccctattccttctattctagccttatttcttatgaggaagatcagaggcaaggagcagaacctagaaaaaactttgtcaagcctaatgaaaccaaaacttacttttggaaagtgcaacatcatatggcacccactaaagatgagtttgactgcaaagcctgggcttatttctctgatgttgacctggaaaaagatgtgcactcaggcctgattggaccccttctggtctgccacactaacacactgaaccctgctcatgggagacaagtgacagtacaggaatttgctctgtttttcaccatctttgatgagaccaaaagctggtacttcactgaaaatatggaaagaaactgcagggctccctgcaatatcggcgcgccatctccagccgggtccccaacttcgaccgaggaagggacctccgagtcagctaccccggagtccggtcctggcacctccaccgaaccatcggagggcagcgcccctgggagccctgccgggagccctacaagcaccgaagagggcaccagtacagagccaagtgaggggagcgcccctggtactagtactgaaccatccgaggggtcagctccaggcacgagtgagtccgctacccccgagagcggaccgggctcagagcccgccacgagtggcagtgaaactccaggctcagaacccgccactagtgggtcagagactccaggcagccctgccggatcccctacgtccaccgaggagggaacatctgagtccgcaacacccgaatccggtccaggcacctccacggaacctagtgaaggctcggcaccaggtgcctcgagccagatggaagatcccacttttaaagagaattatcgcttccatgcaatcaatggctacataatggatacactacctggcttagtaatggctcaggatcaaaggattcgatggtatctgctcagcatgggcagcaatgaaaacatccattctattcatttcagtggacatgtgttcactgtacgaaaaaaagaggagtataaaatggcactgtacaatctctatccaggtgtttttgagacagtggaaatgttaccatccaaagctggaatttggcgggtggaatgccttattggcgagcatctacatgctgggatgagcacactttttctggtgtacagcaataagtgtcagactcccctgggaatggcttctggacacattagagattttcagattacagcttcaggacaatatggacagtgggccccaaagctggccagacttcattattccggatcaatcaatgcctggagcaccaaggagcccttttcttggatcaaggtggatctgttggcaccaatgattattcacggcatcaagacccagggtgcccgtcagaagttctccagcctctacatctctcagtttatcatcatgtatagtcttgatgggaagaagtggcagacttatcgaggaaattccactggaaccttaatggtcttctttggcaatgtggattcatctgggataaaacacaatatttttaaccctccaattattgctcgatacatccgtttgcacccaactcattatagcattcgcagcactcttcgcatggagttgatgggctgtgatttaaatagttgcagcatgccattgggaatggagagtaaagcaatatcagatgcacagattactgcttcatcctactttaccaatatgtttgccacctggtctccttcaaaagctcgacttcacctccaagggaggagtaatgcctggagacctcaggtgaataatccaaaagagtggctgcaagtggacttccagaagacaatgaaagtcacaggagtaactactcagggagtaaaatctctgcttaccagcatgtatgtgaaggagttcctcatctccagcagtcaagatggccatcagtggactctcttttttcagaatggcaaagtaaaggtttttcagggaaatcaagactccttcacacctgtggtgaactctctagacccaccgttactgactcgctaccttcgaattcacccccagagttgggtgcaccagattgccctgaggatggaggttctgggctgcgaggcacaggacctctacggcgccggatcacctggggccgaaacggccgaacaaaaactcatctcagaagaggatctgtcacctgcaaccggtcatcatcaccatcaccattga

SEQ ID NO: 1127 - protein, 1619 aa, synthetic construct
  REGION 1..1619: note = Description of Artificial Sequence: Synthetic polypeptide
ATRRYYLGAVELSWDYMQSDLGELPVDARFPPRVPKSFPFNTSVVYKKTLFVEFTDHLFNIAKPRPPWMGLLGPTIQAEVYDTVVITLKNMASHPVSLHAVGVSYWKASEGAEYDDQTSQREKEDDKVFPGGSHTYVWQVLKENGPMASDPLCLTYSYLSHVDLVKDLNSGLIGALLVCREGSLAKEKTQTLHKFILLFAVFDEGKSWHSETKNSLMQDRDAASARAWPKMHTVNGYVNRSLPGLIGCHRKSVYWHVIGMGTTPEVHSIFLEGHTFLVRNHRQASLEISPITFLTAQTLLMDLGQFLLFCHISSHQHDGMEAYVKVDSCPEEPQLRMKNNEEAEDYDDDLTDSEMDVVRFDDDNSPSFIQIRSVAKKHPKTWVHYIAAEEEDWDYAPLVLAPDDRSYKSQYLNNGPQRIGRKYKKVRFMAYTDETFKTREAIQHESGILGPLLYGEVGDTLLIIFKNQASRPYNIYPHGITDVRPLYSRRLPKGVKHLKDFPILPGEIFKYKWTVTVEDGPTKSDPRCLTRYYSSFVNMERDLASGLIGPLLICYKESVDQRGNQIMSDKRNVILFSVFDENRSWYLTENIQRFLPNPAGVQLEDPEFQASNIMHSINGYVFDSLQLSVCLHEVAYWYILSIGAQTDFLSVFFSGYTFKHKMVYEDTLTLFPFSGETVFMSMENPGLWILGCHNSDFRNRGMTALLKVSSCDKNTGDYYEDSYEDISAYLLSKNNAIEPRSFSQNPPVLKRHQREITRTTLQSDQEEIDYDDTISVEMKKEDFDIYDEDENQSPRSFQKKTRHYFIAAVERLWDYGMSSSPHVLRNRAQSGSVPQFKKVVFQEFTDGSFTQPLYRGELNEHLGLLGPYIRAEVEDNIMVTFRNQASRPYSFYSSLISYEEDQRQGAEPRKNFVKPNETKTYFWKVQHHMAPTKDEFDCKAWAYFSDVDLEKDVHSGLIGPLLVCHTNTLNPAHGRQVTVQEFALFFTIFDETKSWYFTENMERNCRAPCNIQMEDPGAPSPAGSPTSTEEGTSESATPESGPGTSTEPSEGSAPGSPAGSPTSTEEGTSTEPSEGSAPGTSTEPSEGSAPGTSESATPESGPGSEPATSGSETPGSEPATSGSETPGSPAGSPTSTEEGTSESATPESGPGTSTEPSEGSAPGASSTFKENYRFHAINGYIMDTLPGLVMAQDQRIRWYLLSMGSNENIHSIHFSGHVFTVRKKEEYKMALYNLYPGVFETVEMLPSKAGIWRVECLIGEHLHAGMSTLFLVYSNKCQTPLGMASGHIRDFQITASGQYGQWAPKLARLHYSGSINAWSTKEPFSWIKVDLLAPMIIHGIKTQGARQKFSSLYISQFIIMYSLDGKKWQTYRGNSTGTLMVFFGNVDSSGIKHNIFNPPIIARYIRLHPTHYSIRSTLRMELMGCDLNSCSMPLGMESKAISDAQITASSYFTNMFATWSPSKARLHLQGRSNAWRPQVNNPKEWLQVDFQKTMKVTGVTTQGVKSLLTSMYVKEFLISSSQDGHQWTLFFQNGKVKVFQGNQDSFTPVVNSLDPPLLTRYLRIHPQSWVHQIALRMEVLGCEAQDLYGAGSPGAETAEQKLISEEDLSPATGHHHHHH

SEQ ID NO: 1128 - DNA, 4860 bp, synthetic construct
  misc_feature 1..4860: note = Description of Artificial Sequence: Synthetic polynucleotide
  source 1..4860: mol_type = other DNA
gccaccagaagatactacctgggtgcagtggaactgtcatgggactatatgcaaagtgatctcggtgagctgcctgtggacgcaagatttcctcctagagtgccaaaatcttttccattcaacacctcagtcgtgtacaaaaagactctgtttgtagaattcacggatcaccttttcaacatcgctaagccaaggccaccctggatgggtctgctaggtcctaccatccaggctgaggtttatgatacagtggtcattacacttaagaacatggcttcccatcctgtcagtcttcatgctgttggtgtatcctactggaaagcttctgagggagctgaatatgatgatcagaccagtcaaagggagaaagaagatgataaagtcttccctggtggaagccatacatatgtctggcaggtcctgaaagagaatggtccaatggcctctgacccactgtgccttacctactcatatctttctcatgtggacctggtaaaagacttgaattcaggcctcattggagccctactagtatgtagagaagggagtctggccaaggaaaagacacagaccttgcacaaatttatactactttttgctgtatttgatgaagggaaaagttggcactcagaaacaaagaactccttgatgcaggatagggatgctgcatctgctcgggcctggcctaaaatgcacacagtcaatggttatgtaaacaggtctctgccaggtctgattggatgccacaggaaatcagtctattggcatgtgattggaatgggcaccactcctgaagtgcactcaatattcctcgaaggtcacacatttcttgtgaggaaccatcgccaggctagcttggaaatctcgccaataactttccttactgctcaaacactcttgatggaccttggacagtttctactgttttgtcatatctcttcccaccaacatgatggcatggaagcttatgtcaaagtagacagctgtccagaggaaccccaactacgaatgaaaaataatgaagaagcggaagactatgatgatgatcttactgattctgaaatggatgtggtcaggtttgatgatgacaactctccttcctttatccaaattcgctcagttgccaagaagcatcctaaaacttgggtacattacattgctgctgaagaggaggactgggactatgctcccttagtcctcgcccccgatgacagaagttataaaagtcaatatttgaacaatggccctcagcggattggtaggaagtacaaaaaagtccgatttatggcatacacagatgaaacctttaagactcgtgaagctattcagcatgaatcaggaatcttgggacctttactttatggggaagttggagacacactgttgattatatttaagaatcaagcaagcagaccatataacatctaccctcacggaatcactgatgtccgtcctttgtattcaaggagattaccaaaaggtgtaaaacatttgaaggattttccaattctgccaggagaaatattcaaatataaatggacagtgactgtagaagatgggccaactaaatcagatcctcggtgcctgacccgctattactctagtttcgttaatatggagagagatctagcttcaggactcattggccctctcctcatctgctacaaagaatctgtagatcaaagaggaaaccagataatgtcagacaagaggaatgtcatcctgttttctgtatttgatgagaaccgaagctggtacctcacagagaatatacaacgctttctccccaatccagctggagtgcagcttgaggatccagagttccaagcctccaacatcatgcacagcatcaatggctatgtttttgatagtttgcagttgtcagtttgtttgcatgaggtggcatactggtacattctaagcattggagcacagactgacttcctttctgtcttcttctctggatataccttcaaacacaaaatggtctatgaagacacactcaccctattcccattctcaggagaaactgtcttcatgtcgatggaaaacccaggtctatggattctggggtgccacaactcagactttcggaacagaggcatgaccgccttactgaaggtttctagttgtgacaagaacactggtgattattacgaggacagttatgaagatatttcagcatacttgctgagtaaaaacaatgccattgaaccaagaagcttctctcaaaacccaccagtcttgaaacgccatcaacgggaaataactcgtactactcttcagtcagatcaagaggaaatcgattatgatgataccatatcagttgaaatgaagaaggaagattttgacatttatgatgaggatgaaaatcagagcccccgcagctttcaaaagaaaacacgacactattttattgctgcagtggagaggctctgggattatgggatgagtagctccccacatgttctaagaaacagggctcagagtggcagtgtccctcagttcaagaaagttgttttccaggaatttactgatggctcctttactcagcccttataccgtggagaactaaatgaacatttgggactcctggggccatatataagagcagaagttgaagataatatcatggtaactttcagaaatcaggcctctcgtccctattccttctattctagccttatttcttatgaggaagatcagaggcaaggagcagaacctagaaaaaactttgtcaagcctaatgaaaccaaaacttacttttggaaagtgcaacatcatatggcacccactaaagatgagtttgactgcaaagcctgggcttatttctctgatgttgacctggaaaaagatgtgcactcaggcctgattggaccccttctggtctgccacactaacacactgaaccctgctcatgggagacaagtgacagtacaggaatttgctctgtttttcaccatctttgatgagaccaaaagctggtacttcactgaaaatatggaaagaaactgcagggctccctgcaatatccagatggaagatcccggcgcgccatctccagccgggtccccaacttcgaccgaggaagggacctccgagtcagctaccccggagtccggtcctggcacctccaccgaaccatcggagggcagcgcccctgggagccctgccgggagccctacaagcaccgaagagggcaccagtacagagccaagtgaggggagcgcccctggtactagtactgaaccatccgaggggtcagctccaggcacgagtgagtccgctacccccgagagcggaccgggctcagagcccgccacgagtggcagtgaaactccaggctcagaacccgccactagtgggtcagagactccaggcagccctgccggatcccctacgtccaccgaggagggaacatctgagtccgcaacacccgaatccggtccaggcacctccacggaacctagtgaaggctcggcaccaggtgcctcgagcacttttaaagagaattatcgcttccatgcaatcaatggctacataatggatacactacctggcttagtaatggctcaggatcaaaggattcgatggtatctgctcagcatgggcagcaatgaaaacatccattctattcatttcagtggacatgtgttcactgtacgaaaaaaagaggagtataaaatggcactgtacaatctctatccaggtgtttttgagacagtggaaatgttaccatccaaagctggaatttggcgggtggaatgccttattggcgagcatctacatgctgggatgagcacactttttctggtgtacagcaataagtgtcagactcccctgggaatggcttctggacacattagagattttcagattacagcttcaggacaatatggacagtgggccccaaagctggccagacttcattattccggatcaatcaatgcctggagcaccaaggagcccttttcttggatcaaggtggatctgttggcaccaatgattattcacggcatcaagacccagggtgcccgtcagaagttctccagcctctacatctctcagtttatcatcatgtatagtcttgatgggaagaagtggcagacttatcgaggaaattccactggaaccttaatggtcttctttggcaatgtggattcatctgggataaaacacaatatttttaaccctccaattattgctcgatacatccgtttgcacccaactcattatagcattcgcagcactcttcgcatggagttgatgggctgtgatttaaatagttgcagcatgccattgggaatggagagtaaagcaatatcagatgcacagattactgcttcatcctactttaccaatatgtttgccacctggtctccttcaaaagctcgacttcacctccaagggaggagtaatgcctggagacctcaggtgaataatccaaaagagtggctgcaagtggacttccagaagacaatgaaagtcacaggagtaactactcagggagtaaaatctctgcttaccagcatgtatgtgaaggagttcctcatctccagcagtcaagatggccatcagtggactctcttttttcagaatggcaaagtaaaggtttttcagggaaatcaagactccttcacacctgtggtgaactctctagacccaccgttactgactcgctaccttcgaattcacccccagagttgggtgcaccagattgccctgaggatggaggttctgggctgcgaggcacaggacctctacggcgccggatcacctggggccgaaacggccgaacaaaaactcatctcagaagaggatctgtcacctgcaaccggtcatcatcaccatcaccattga

SEQ ID NO: 1129 - protein, 1619 aa, synthetic construct
  REGION 1..1619: note = Description of Artificial Sequence: Synthetic polypeptide
ATRRYYLGAVELSWDYMQSDLGELPVDARFPPRVPKSFPFNTSVVYKKTLFVEFTDHLFNIAKPRPPWMGLLGPTIQAEVYDTVVITLKNMASHPVSLHAVGVSYWKASEGAEYDDQTSQREKEDDKVFPGGSHTYVWQVLKENGPMASDPLCLTYSYLSHVDLVKDLNSGLIGALLVCREGSLAKEKTQTLHKFILLFAVFDEGKSWHSETKNSLMQDRDAASARAWPKMHTVNGYVNRSLPGLIGCHRKSVYWHVIGMGTTPEVHSIFLEGHTFLVRNHRQASLEISPITFLTAQTLLMDLGQFLLFCHISSHQHDGMEAYVKVDSCPEEPQLRMKNNEEAEDYDDDLTDSEMDVVRFDDDNSPSFIQIRSVAKKHPKTWVHYIAAEEEDWDYAPLVLAPDDRSYKSQYLNNGPQRIGRKYKKVRFMAYTDETFKTREAIQHESGILGPLLYGEVGDTLLIIFKNQASRPYNIYPHGITDVRPLYSRRLPKGVKHLKDFPILPGEIFKYKWTVTVEDGPTKSDPRCLTRYYSSFVNMERDLASGLIGPLLICYKESVDQRGNQIMSDKRNVILFSVFDENRSWYLTENIQRFLPNPAGVQLEDPEFQASNIMHSINGYVFDSLQLSVCLHEVAYWYILSIGAQTDFLSVFFSGYTFKHKMVYEDTLTLFPFSGETVFMSMENPGLWILGCHNSDFRNRGMTALLKVSSCDKNTGDYYEDSYEDISAYLLSKNNAIEPRSFSQNPPVLKRHQREITRTTLQSDQEEIDYDDTISVEMKKEDFDIYDEDENQSPRSFQKKTRHYFIAAVERLWDYGMSSSPHVLRNRAQSGSVPQFKKVVFQEFTDGSFTQPLYRGELNEHLGLLGPYIRAEVEDNIMVTFRNQASRPYSFYSSLISYEEDQRQGAEPRKNFVKPNETKTYFWKVQHHMAPTKDEFDCKAWAYFSDVDLEKDVHSGLIGPLLVCHTNTLNPAHGRQVTVQEFALFFTIFDETKSWYFTENMERNCRGAPSPAGSPTSTEEGTSESATPESGPGTSTEPSEGSAPGSPAGSPTSTEEGTSTEPSEGSAPGTSTEPSEGSAPGTSESATPESGPGSEPATSGSETPGSEPATSGSETPGSPAGSPTSTEEGTSESATPESGPGTSTEPSEGSAPGASSAPCNIQMEDPTFKENYRFHAINGYIMDTLPGLVMAQDQRIRWYLLSMGSNENIHSIHFSGHVFTVRKKEEYKMALYNLYPGVFETVEMLPSKAGIWRVECLIGEHLHAGMSTLFLVYSNKCQTPLGMASGHIRDFQITASGQYGQWAPKLARLHYSGSINAWSTKEPFSWIKVDLLAPMIIHGIKTQGARQKFSSLYISQFIIMYSLDGKKWQTYRGNSTGTLMVFFGNVDSSGIKHNIFNPPIIARYIRLHPTHYSIRSTLRMELMGCDLNSCSMPLGMESKAISDAQITASSYFTNMFATWSPSKARLHLQGRSNAWRPQVNNPKEWLQVDFQKTMKVTGVTTQGVKSLLTSMYVKEFLISSSQDGHQWTLFFQNGKVKVFQGNQDSFTPVVNSLDPPLLTRYLRIHPQSWVHQIALRMEVLGCEAQDLYGAGSPGAETAEQKLISEEDLSPATGHHHHHH

SEQ ID NO: 1130 - DNA, 4860 bp, synthetic construct
  misc_feature 1..4860: note = Description of Artificial Sequence: Synthetic polynucleotide
  source 1..4860: mol_type = other DNA
gccaccagaagatactacctgggtgcagtggaactgtcatgggactatatgcaaagtgatctcggtgagctgcctgtggacgcaagatttcctcctagagtgccaaaatcttttccattcaacacctcagtcgtgtacaaaaagactctgtttgtagaattcacggatcaccttttcaacatcgctaagccaaggccaccctggatgggtctgctaggtcctaccatccaggctgaggtttatgatacagtggtcattacacttaagaacatggcttcccatcctgtcagtcttcatgctgttggtgtatcctactggaaagcttctgagggagctgaatatgatgatcagaccagtcaaagggagaaagaagatgataaagtcttccctggtggaagccatacatatgtctggcaggtcctgaaagagaatggtccaatggcctctgacccactgtgccttacctactcatatctttctcatgtggacctggtaaaagacttgaattcaggcctcattggagccctactagtatgtagagaagggagtctggccaaggaaaagacacagaccttgcacaaatttatactactttttgctgtatttgatgaagggaaaagttggcactcagaaacaaagaactccttgatgcaggatagggatgctgcatctgctcgggcctggcctaaaatgcacacagtcaatggttatgtaaacaggtctctgccaggtctgattggatgccacaggaaatcagtctattggcatgtgattggaatgggcaccactcctgaagtgcactcaatattcctcgaaggtcacacatttcttgtgaggaaccatcgccaggctagcttggaaatctcgccaataactttccttactgctcaaacactcttgatggaccttggacagtttctactgttttgtcatatctcttcccaccaacatgatggcatggaagcttatgtcaaagtagacagctgtccagaggaaccccaactacgaatgaaaaataatgaagaagcggaagactatgatgatgatcttactgattctgaaatggatgtggtcaggtttgatgatgacaactctccttcctttatccaaattcgctcagttgccaagaagcatcctaaaacttgggtacattacattgctgctgaagaggaggactgggactatgctcccttagtcctcgcccccgatgacagaagttataaaagtcaatatttgaacaatggccctcagcggattggtaggaagtacaaaaaagtccgatttatggcatacacagatgaaacctttaagactcgtgaagctattcagcatgaatcaggaatcttgggacctttactttatggggaagttggagacacactgttgattatatttaagaatcaagcaagcagaccatataacatctaccctcacggaatcactgatgtccgtcctttgtattcaaggagattaccaaaaggtgtaaaacatttgaaggattttccaattctgccaggagaaatattcaaatataaatggacagtgactgtagaagatgggccaactaaatcagatcctcggtgcctgacccgctattactctagtttcgttaatatggagagagatctagcttcaggactcattggccctctcctcatctgctacaaagaatctgtagatcaaagaggaaaccagataatgtcagacaagaggaatgtcatcctgttttctgtatttgatgagaaccgaagctggtacctcacagagaatatacaacgctttctccccaatccagctggagtgcagcttgaggatccagagttccaagcctccaacatcatgcacagcatcaatggctatgtttttgatagtttgcagttgtcagtttgtttgcatgaggtggcatactggtacattctaagcattggagcacagactgacttcctttctgtcttcttctctggatataccttcaaacacaaaatggtctatgaagacacactcaccctattcccattctcaggagaaactgtcttcatgtcgatggaaaacccaggtctatggattctggggtgccacaactcagactttcggaacagaggcatgaccgccttactgaaggtttctagttgtgacaagaacactggtgattattacgaggacagttatgaagatatttcagcatacttgctgagtaaaaacaatgccattgaaccaagaagcttctctcaaaacccaccagtcttgaaacgccatcaacgggaaataactcgtactactcttcagtcagatcaagaggaaatcgattatgatgataccatatcagttgaaatgaagaaggaagattttgacatttatgatgaggatgaaaatcagagcccccgcagctttcaaaagaaaacacgacactattttattgctgcagtggagaggctctgggattatgggatgagtagctccccacatgttctaagaaacagggctcagagtggcagtgtccctcagttcaagaaagttgttttccaggaatttactgatggctcctttactcagcccttataccgtggagaactaaatgaacatttgggactcctggggccatatataagagcagaagttgaagataatatcatggtaactttcagaaatcaggcctctcgtccctattccttctattctagccttatttcttatgaggaagatcagaggcaaggagcagaacctagaaaaaactttgtcaagcctaatgaaaccaaaacttacttttggaaagtgcaacatcatatggcacccactaaagatgagtttgactgcaaagcctgggcttatttctctgatgttgacctggaaaaagatgtgcactcaggcctgattggaccccttctggtctgccacactaacacactgaaccctgctcatgggagacaagtgacagtacaggaatttgctctgtttttcaccatctttgatgagaccaaaagctggtacttcactgaaaatatggaaagaaactgcaggggcgcgccatctccagccgggtccccaacttcgaccgaggaagggacctccgagtcagctaccccggagtccggtcctggcacctccaccgaaccatcggagggcagcgcccctgggagccctgccgggagccctacaagcaccgaagagggcaccagtacagagccaagtgaggggagcgcccctggtactagtactgaaccatccgaggggtcagctccaggcacgagtgagtccgctacccccgagagcggaccgggctcagagcccgccacgagtggcagtgaaactccaggctcagaacccgccactagtgggtcagagactccaggcagccctgccggatcccctacgtccaccgaggagggaacatctgagtccgcaacacccgaatccggtccaggcacctccacggaacctagtgaaggctcggcaccaggtgcctcgagcgctccctgcaatatccagatggaagatcccacttttaaagagaattatcgcttccatgcaatcaatggctacataatggatacactacctggcttagtaatggctcaggatcaaaggattcgatggtatctgctcagcatgggcagcaatgaaaacatccattctattcatttcagtggacatgtgttcactgtacgaaaaaaagaggagtataaaatggcactgtacaatctctatccaggtgtttttgagacagtggaaatgttaccatccaaagctggaatttggcgggtggaatgccttattggcgagcatctacatgctgggatgagcacactttttctggtgtacagcaataagtgtcagactcccctgggaatggcttctggacacattagagattttcagattacagcttcaggacaatatggacagtgggccccaaagctggccagacttcattattccggatcaatcaatgcctggagcaccaaggagcccttttcttggatcaaggtggatctgttggcaccaatgattattcacggcatcaagacccagggtgcccgtcagaagttctccagcctctacatctctcagtttatcatcatgtatagtcttgatgggaagaagtggcagacttatcgaggaaattccactggaaccttaatggtcttctttggcaatgtggattcatctgggataaaacacaatatttttaaccctccaattattgctcgatacatccgtttgcacccaactcattatagcattcgcagcactcttcgcatggagttgatgggctgtgatttaaatagttgcagcatgccattgggaatggagagtaaagcaatatcagatgcacagattactgcttcatcctactttaccaatatgtttgccacctggtctccttcaaaagctcgacttcacctccaagggaggagtaatgcctggagacctcaggtgaataatccaaaagagtggctgcaagtggacttccagaagacaatgaaagtcacaggagtaactactcagggagtaaaatctctgcttaccagcatgtatgtgaaggagttcctcatctccagcagtcaagatggccatcagtggactctcttttttcagaatggcaaagtaaaggtttttcagggaaatcaagactccttcacacctgtggtgaactctctagacccaccgttactgactcgctaccttcgaattcacccccagagttgggtgcaccagattgccctgaggatggaggttctgggctgcgaggcacaggacctctacggcgccggatcacctggggccgaaacggccgaacaaaaactcatctcagaagaggatctgtcacctgcaaccggtcatcatcaccatcaccattga

SEQ ID NO: 1131 - protein, 1619 aa, synthetic construct; identical to SEQ ID NO: 747
  REGION 1..1619: note = Description of Artificial Sequence: Synthetic polypeptide

SEQ ID NO: 1132 - DNA, 4860 bp, synthetic construct; identical to SEQ ID NO: 748
  misc_feature 1..4860: note = Description of Artificial Sequence: Synthetic polynucleotide
  source 1..4860: mol_type = other DNA

SEQ ID NO: 1133 - protein, 1857 aa, synthetic construct
  REGION 1..1857: note = Description of Artificial Sequence: Synthetic polypeptide
ATRRYYLGAVELSWDYMQSDLGELPVDARFPPRVPKSFPFNTSVVYKKTLFVEFTDHLFNIAKPRPPWMGLLGPTIQAEVYDTVVITLKNMASHPVSLHAVGVSYWKASEGAEYDDQTSQREKEDDKVFPGGSHTYVWQVLKENGPMASDPLCLTYSYLSHVDLVKDLNSGLIGALLVCREGSLAKEKTQTLHKFILLFAVFDEGKSWHSETKNSLMQDRDAASARAWPKMHTVNGYVNRSLPGLIGCHRKSVYWHVIGMGTTPEVHSIFLEGHTFLVRNHRQASLEISPITFLTAQTLLMDLGQFLLFCHISSHQHDGMEAYVKVDSCPEEPQLRMKNNEEAEDYDDDLTDSEMDVVRFDDDNSPSFIQIRSVAKKHPKTWVHYIAAEEEDWDYAPLVLAPDDRSYKSQYLNNGPQRIGRKYKKVRFMAYTDETFKTREAIQHESGILGPLLYGEVGDTLLIIFKNQASRPYNIYPHGITDVRPLYSRRLPKGVKHLKDFPILPGEIFKYKWTVTVEDGPTKSDPRCLTRYYSSFVNMERDLASGLIGPLLICYKESVDQRGNQIMSDKRNVILFSVFDENRSWYLTENIQRFLPNPAGVQLEDPEFQASNIMHSINGYVFDSLQLSVCLHEVAYWYILSIGAQTDFLSVFFSGYTFKHKMVYEDTLTLFPFSGETVFMSMENPGLWILGCHNSDFRNRGMTALLKVSSCDKNTGDYYEDSYEDISAYLLSKNNAIEPRSFSQNGAPSPAGSPTSTEEGTSESATPESGPGSEPATSGSETPGTSESATPESGPGTSTEPSEGSAPGTSTEPSEGSAPGTSTEPSEGSAPGTSTEPSEGSAPGTSTEPSEGSAPGTSTEPSEGSAPGSPAGSPTSTEEGTSTEPSEGSAPGASSQSPRSFQKKTRHYFIAAVERLWDYGMSSSPHVLRNRAQSGSVPQFKKVVFQEFTDGSFTQPLYRGELNEHLGLLGPYIRAEVEDNIMVTFRNQASRPYSFYSSLISYEEDQRQGAEPRKNFVKPNETKTYFWKVQHHMAPTKDEFDCKAWAYFSDVDLEKDVHSGLIGPLLVCHTNTLNPAHGRQVTVQEFALFFTIFDETKSWYFTENMERNCRAPCNIQMEDPTFKENYRFHAINGYIMDTLPGLVMAQDQRIRWYLLSMGSNENIHSIHFSGHVFTVRKKEEYKMALYNLYPGVFETVEMLPSKAGIWRVECLIGEHLHAGMSTLFLVYSNKCQTPLGMASGHIRDFQITASGQYGQWAPKLARLHYSGSINAWSTKEPFSWIKVDLLAPMIIHGIKTQGARQKFSSLYISQFIIMYSLDGKKWQTYRGNSTGTLMVFFGNVDSSGIKHNIFNPPIIARYIRLHPTHYSIRSTLRMELMGCDLNSCSMPLGMESKAISDAQITASSYFTNMFATWSPSKARLHLQGRSNAWRPQVNNPKEWLQVDFQKTMKVTGVTTQGVKSLLTSMYVKEFLISSSQDGHQWTLFFQNGKVKVFQGNQDSFTPVVNSLDPPLLTRYLRIHPQSWVHQIALRMEVLGCEAQDLYGAPGTSESATPESGPGSEPATSGSETPGTSESATPESGPGSEPATSGSETPGTSESATPESGPGTSTEPSEGSAPGSPAGSPTSTEEGTSESATPESGPGSEPATSGSETPGTSESATPESGPGSPAGSPTSTEEGSPAGSPTSTEEGTSTEPSEGSAPGTSESATPESGPGTSESATPESGPGTSESATPESGPGSEPATSGSETPGSEPATSGSETPGSPAGSPTSTEEGTSTEPSEGSAPGTSTEPSEGSAPGSEPATSGSETPGTSESATPESGPGTSTEPSEGSAPASSEQKLISEEDLSPATGHHHHHH

SEQ ID NO: 1134 - DNA, 5574 bp, synthetic construct
  misc_feature 1..5574: note = Description of Artificial Sequence: Synthetic polynucleotide
  source 1..5574: mol_type = other DNA
gccaccagaagatactacctgggtgcagtggaactgtcatgggactatatgcaaagtgatctcggtgagctgcctgtggacgcaagatttcctcctagagtgccaaaatcttttccattcaacacctcagtcgtgtacaaaaagactctgtttgtagaattcacggatcaccttttcaacatcgctaagccaaggccaccctggatgggtctgctaggtcctaccatccaggctgaggtttatgatacagtggtcattacacttaagaacatggcttcccatcctgtcagtcttcatgctgttggtgtatcctactggaaagcttctgagggagctgaatatgatgatcagaccagtcaaagggagaaagaagatgataaagtcttccctggtggaagccatacatatgtctggcaggtcctgaaagagaatggtccaatggcctctgacccactgtgccttacctactcatatctttctcatgtggacctggtaaaagacttgaattcaggcctcattggagccctactagtatgtagagaagggagtctggccaaggaaaagacacagaccttgcacaaatttatactactttttgctgtatttgatgaagggaaaagttggcactcagaaacaaagaactccttgatgcaggatagggatgctgcatctgctcgggcctggcctaaaatgcacacagtcaatggttatgtaaacaggtctctgccaggtctgattggatgccacaggaaatcagtctattggcatgtgattggaatgggcaccactcctgaagtgcactcaatattcctcgaaggtcacacatttcttgtgaggaaccatcgccaggctagcttggaaatctcgccaataactttccttactgctcaaacactcttgatggaccttggacagtttctactgttttgtcatatctcttcccaccaacatgatggcatggaagcttatgtcaaagtagacagctgtccagaggaaccccaactacgaatgaaaaataatgaagaagcggaagactatgatgatgatcttactgattctgaaatggatgtggtcaggtttgatgatgacaactctccttcctttatccaaattcgctcagttgccaagaagcatcctaaaacttgggtacattacattgctgctgaagaggaggactgggactatgctcccttagtcctcgcccccgatgacagaagttataaaagtcaatatttgaacaatggccctcagcggattggtaggaagtacaaaaaagtccgatttatggcatacacagatgaaacctttaagactcgtgaagctattcagcatgaatcaggaatcttgggacctttactttatggggaagttggagacacactgttgattatatttaagaatcaagcaagcagaccatataacatctaccctcacggaatcactgatgtccgtcctttgtattcaaggagattaccaaaaggtgtaaaacatttgaaggattttccaattctgccaggagaaatattcaaatataaatggacagtgactgtagaagatgggccaactaaatcagatcctcggtgcctgacccgctattactctagtttcgttaatatggagagagatctagcttcaggactcattggccctctcctcatctgctacaaagaatctgtagatcaaagaggaaaccagataatgtcagacaagaggaatgtcatcctgttttctgtatttgatgagaaccgaagctggtacctcacagagaatatacaacgctttctccccaatccagctggagtgcagcttgaggatccagagttccaagcctccaacatcatgcacagcatcaatggctatgtttttgatagtttgcagttgtcagtttgtttgcatgaggtggcatactggtacattctaagcattggagcacagactgacttcctttctgtcttcttctctggatataccttcaaacacaaaatggtctatgaagacacactcaccctattcccattctcaggagaaactgtcttcatgtcgatggaaaacccaggtctatggattctggggtgccacaactcagactttcggaacagaggcatgaccgccttactgaaggtttctagttgtgacaagaacactggtgattattacgaggacagttatgaagatatttcagcatacttgctgagtaaaaacaatgccattgaaccaagaagcttctctcaaaacggcgcgccaagtcccgctggaagcccaactagcaccgaagaggggacctcagagtccgccacccccgagtccggccctggctctgagcctgccactagcggctccgagactcctggcacatccgaaagcgctacacccgagagtggacccggcacctctaccgagcccagtgagggctccgcccctggaacaagcaccgagcccagcgaaggcagcgccccagggacctccacagagcccagtgaaggcagtgctcctggcaccagcaccgaaccaagcgagggctctgcacccgggacctccaccgagccaagcgaaggctctgcccctggcacttccaccgagcccagcgaaggcagcgcccctgggagccccgctggctctcccaccagcactgaggagggcacatctaccgaaccaagtgaaggctctgcaccaggtgcctcgagccagagcccccgcagctttcaaaagaaaacacgacactattttattgctgcagtggagaggctctgggattatgggatgagtagctccccacatgttctaagaaacagggctcagagtggcagtgtccctcagttcaagaaagttgttttccaggaatttactgatggctcctttactcagcccttataccgtggagaactaaatgaacatttgggactcctggggccatatataagagcagaagttgaagataatatcatggtaactttcagaaatcaggcctctcgtccctattccttctattctagccttatttcttatgaggaagatcagaggcaaggagcagaacctagaaaaaactttgtcaagcctaatgaaaccaaaacttacttttggaaagtgcaacatcatatggcacccactaaagatgagtttgactgcaaagcctgggcttatttctctgatgttgacctggaaaaagatgtgcactcaggcctgattggaccccttctggtctgccacactaacacactgaaccctgctcatgggagacaagtgacagtacaggaatttgctctgtttttcaccatctttgatgagaccaaaagctggtacttcactgaaaatatggaaagaaactgcagggctccctgcaatatccagatggaagatcccacttttaaagagaattatcgcttccatgcaatcaatggctacataatggatacactacctggcttagtaatggctcaggatcaaaggattcgatggtatctgctcagcatgggcagcaatgaaaacatccattctattcatttcagtggacatgtgttcactgtacgaaaaaaagaggagtataaaatggcactgtacaatctctatccaggtgtttttgagacagtggaaatgttaccatccaaagctggaatttggcgggtggaatgccttattggcgagcatctacatgctgggatgagcacactttttctggtgtacagcaataagtgtcagactcccctgggaatggcttctggacacattagagattttcagattacagcttcaggacaatatggacagtgggccccaaagctggccagacttcattattccggatcaatcaatgcctggagcaccaaggagcccttttcttggatcaaggtggatctgttggcaccaatgattattcacggcatcaagacccagggtgcccgtcagaagttctccagcctctacatctctcagtttatcatcatgtatagtcttgatgggaagaagtggcagacttatcgaggaaattccactggaaccttaatggtcttctttggcaatgtggattcatctgggataaaacacaatatttttaaccctccaattattgctcgatacatccgtttgcacccaactcattatagcattcgcagcactcttcgcatggagttgatgggctgtgatttaaatagttgcagcatgccattgggaatggagagtaaagcaatatcagatgcacagattactgcttcatcctactttaccaatatgtttgccacctggtctccttcaaaagctcgacttcacctccaagggaggagtaatgcctggagacctcaggtgaataatccaaaagagtggctgcaagtggacttccagaagacaatgaaagtcacaggagtaactactcagggagtaaaatctctgcttaccagcatgtatgtgaaggagttcctcatctccagcagtcaagatggccatcagtggactctcttttttcagaatggcaaagtaaaggtttttcagggaaatcaagactccttcacacctgtggtgaactctctagacccaccgttactgactcgctaccttcgaattcacccccagagttgggtgcaccagattgccctgaggatggaggttctgggctgcgaggcacaggacctctacggcgcgccaggtacctcagagtctgctacccccgagtcagggccaggatcagagccagccacctccgggtctgagacacccgggacttccgagagtgccacccctgagtccggacccgggtccgagcccgccacttccggctccgaaactcccggcacaagcgagagcgctaccccagagtcaggaccaggaacatctacagagccctctgaaggctccgctccagggtccccagccggcagtcccactagcaccgaggagggaacctctgaaagcgccacacccgaatcagggccagggtctgagcctgctaccagcggcagcgagacaccaggcacctctgagtccgccacaccagagtccggacccggatctcccgctgggagccccacctccactgaggagggatctcctgctggctctccaacatctactgaggaaggtacctcaaccgagccatccgagggatcagctcccggcacctcagagtcggcaaccccggagtctggacccggaacttccgaaagtgccacaccagagtccggtcccgggacttcagaatcagcaacacccgagtccggccctgggtctgaacccgccacaagtggtagtgagacaccaggatcagaacctgctacctcagggtcagagacacccggatctccggcaggctcaccaacctccactgaggagggcaccagcacagaaccaagcgagggctccgcacccggaacaagcactgaacccagtgagggttcagcacccggctctgagccggccacaagtggcagtgagacacccggcacttcagagagtgccacccccgagagtggcccaggcactagtaccgagccctctgaaggcagtgcgccagcctcgagcgaacaaaaactcatctcagaagaggatctgtcacctgcaaccggtcatcatcaccatcaccattga

SEQ ID NO: 1135 - protein, 1903 aa, synthetic construct
  REGION 1..1903: note = Description of Artificial Sequence: Synthetic polypeptide
ATRRYYLGAVELSWDYMQSDLGELPVDARFPPRVPKSFPFNTSVVYKKTLFVEFTDHLFNIAKPRPPWMGLLGPTIQAEVYDTVVITLKNMASHPVSLHAVGVSYWKASEGAEYDDQTSQREKEDDKVFPGGSHTYVWQVLKENGPMASDPLCLTYSYLSHVDLVKDLNSGLIGALLVCREGSLAKEKTQTLHKFILLFAVFDEGKSWHSETKNSLMQDRDAASARAWPKMHTVNGYVNRSLPGLIGCHRKSVYWHVIGMGTTPEVHSIFLEGHTFLVRNHRQASLEISPITFLTAQTLLMDLGQFLLFCHISSHQHDGMEAYVKVDSCPEEPQLRMKNNEEAEDYDDDLTDSEMDVVRFDDDNSPSFIQIRSVAKKHPKTWVHYIAAEEEDWDYAPLVLAPDDRSYKSQYLNNGPQRIGRKYKKVRFMAYTDETFKTREAIQHESGILGPLLYGEVGDTLLIIFKNQASRPYNIYPHGITDVRPLYSRRLPKGVKHLKDFPILPGEIFKYKWTVTVEDGPTKSDPRCLTRYYSSFVNMERDLASGLIGPLLICYKESVDQRGNQIMSDKRNVILFSVFDENRSWYLTENIQRFLPNPAGVQLEDPEFQASNIMHSINGYVFDSLQLSVCLHEVAYWYILSIGAQTDFLSVFFSGYTFKHKMVYEDTLTLFPFSGETVFMSMENPGLWILGCHNSDFRNRGMTALLKVSSCDKNTGDYYEDSYEDISAYLLSKNNAIEPRSFSQNGAPSPAGSPTSTEEGTSESATPESGPGSEPATSGSETPGTSESATPESGPGTSTEPSEGSAPGTSTEPSEGSAPGTSTEPSEGSAPGTSTEPSEGSAPGTSTEPSEGSAPGTSTEPSEGSAPGSPAGSPTSTEEGTSTEPSEGSAPGASSPPVLKRHQAEITRTTLQSDQEEIDYDDTISVEMKKEDFDIFDEDENQSPRSFQKKTRHYFIAAVERLWDYGMSSSPHVLRNRAQSGSVPQFKKVVFQEFTDGSFTQPLYRGELNEHLGLLGPYIRAEVEDNIMVTFRNQASRPYSFYSSLISYEEDQRQGAEPRKNFVKPNETKTYFWKVQHHMAPTKDEFDCKAWAYFSDVDLEKDVHSGLIGPLLVCHTNTLNPAHGRQVTVQEFALFFTIFDETKSWYFTENMERNCRAPCNIQMEDPTFKENYRFHAINGYIMDTLPGLVMAQDQRIRWYLLSMGSNENIHSIHFSGHVFTVRKKEEYKMALYNLYPGVFETVEMLPSKAGIWRVECLIGEHLHAGMSTLFLVYSNKCQTPLGMASGHIRDFQITASGQYGQWAPKLARLHYSGSINAWSTKEPFSWIKVDLLAPMIIHGIKTQGARQKFSSLYISQFIIMYSLDGKKWQTYRGNSTGTLMVFFGNVDSSGIKHNIFNPPIIARYIRLHPTHYSIRSTLRMELMGCDLNSCSMPLGMESKAISDAQITASSYFTNMFATWSPSKARLHLQGRSNAWRPQVNNPKEWLQVDFQKTMKVTGVTTQGVKSLLTSMYVKEFLISSSQDGHQWTLFFQNGKVKVFQGNQDSFTPVVNSLDPPLLTRYLRIHPQSWVHQIALRMEVLGCEAQDLYGAPGTSESATPESGPGSEPATSGSETPGTSESATPESGPGSEPATSGSETPGTSESATPESGPGTSTEPSEGSAPGSPAGSPTSTEEGTSESATPESGPGSEPATSGSETPGTSESATPESGPGSPAGSPTSTEEGSPAGSPTSTEEGTSTEPSEGSAPGTSESATPESGPGTSESATPESGPGTSESATPESGPGSEPATSGSETPGSEPATSGSETPGSPAGSPTSTEEGTSTEPSEGSAPGTSTEPSEGSAPGSEPATSGSETPGTSESATPESGPGTSTEPSEGSAPASSEQKLISEEDLSPATGHHHHHH

SEQ ID NO: 1136 - DNA, 5712 bp, synthetic construct
  misc_feature 1..5712: note = Description of Artificial Sequence: Synthetic polynucleotide
  source 1..5712: mol_type = other DNA
gccaccagaagatactacctgggtgcagtggaactgtcatgggactatatgcaaagtgatctcggtgagctgcctgtggacgcaagatttcctcctagagtgccaaaatcttttccattcaacacctcagtcgtgtacaaaaagactctgtttgtagaattcacggatcaccttttcaacatcgctaagccaaggccaccctggatgggtctgctaggtcctaccatccaggctgaggtttatgatacagtggtcattacacttaagaacatggcttcccatcctgtcagtcttcatgctgttggtgtatcctactggaaagcttctgagggagctgaatatgatgatcagaccagtcaaagggagaaagaagatgataaagtcttccctggtggaagccatacatatgtctggcaggtcctgaaagagaatggtccaatggcctctgacccactgtgccttacctactcatatctttctcatgtggacctggtaaaagacttgaattcaggcctcattggagccctactagtatgtagagaagggagtctggccaaggaaaagacacagaccttgcacaaatttatactactttttgctgtatttgatgaagggaaaagttggcactcagaaacaaagaactccttgatgcaggatagggatgctgcatctgctcgggcctggcctaaaatgcacacagtcaatggttatgtaaacaggtctctgccaggtctgattggatgccacaggaaatcagtctattggcatgtgattggaatgggcaccactcctgaagtgcactcaatattcctcgaaggtcacacatttcttgtgaggaaccatcgccaggctagcttggaaatctcgccaataactttccttactgctcaaacactcttgatggaccttggacagtttctactgttttgtcatatctcttcccaccaacatgatggcatggaagcttatgtcaaagtagacagctgtccagaggaaccccaactacgaatgaaaaataatgaagaagcggaagactatgatgatgatcttactgattctgaaatggatgtggtcaggtttgatgatgacaactctccttcctttatccaaattcgctcagttgccaagaagcatcctaaaacttgggtacattacattgctgctgaagaggaggactgggactatgctcccttagtcctcgcccccgatgacagaagttataaaagtcaatatttgaacaatggccctcagcggattggtaggaagtacaaaaaagtccgatttatggcatacacagatgaaacctttaagactcgtgaagctattcagcatgaatcaggaatcttgggacctttactttatggggaagttggagacacactgttgattatatttaagaatcaagcaagcagaccatataacatctaccctcacggaatcactgatgtccgtcctttgtattcaaggagattaccaaaaggtgtaaaacatttgaaggattttccaattctgccaggagaaatattcaaatataaatggacagtgactgtagaagatgggccaactaaatcagatcctcggtgcctgacccgctattactctagtttcgttaatatggagagagatctagcttcaggactcattggccctctcctcatctgctacaaagaatctgtagatcaaagaggaaaccagataatgtcagacaagaggaatgtcatcctgttttctgtatttgatgagaaccgaagctggtacctcacagagaatatacaacgctttctccccaatccagctggagtgcagcttgaggatccagagttccaagcctccaacatcatgcacagcatcaatggctatgtttttgatagtttgcagttgtcagtttgtttgcatgaggtggcatactggtacattctaagcattggagcacagactgacttcctttctgtcttcttctctggatataccttcaaacacaaaatggtctatgaagacacactcaccctattcccattctcaggagaaactgtcttcatgtcgatggaaaacccaggtctatggattctggggtgccacaactcagactttcggaacagaggcatgaccgccttactgaaggtttctagttgtgacaagaacactggtgattattacgaggacagttatgaagatatttcagcatacttgctgagtaaaaacaatgccattgaaccaagaagcttctctcaaaacggcgcgccaagtcccgctggaagcccaactagcaccgaagaggggacctcagagtccgccacccccgagtccggccctggctctgagcctgccactagcggctccgagactcctggcacatccgaaagcgctacacccgagagtggacccggcacctctaccgagcccagtgagggctccgcccctggaacaagcaccgagcccagcgaaggcagcgccccagggacctccacagagcccagtgaaggcagtgctcctggcaccagcaccgaaccaagcgagggctctgcacccgggacctccaccgagccaagcgaaggctctgcccctggcacttccaccgagcccagcgaaggcagcgcccctgggagccccgctggctctcccaccagcactgaggagggcacatctaccgaaccaagtgaaggctctgcaccaggtgcctcgagcccaccagtcttgaaacgccatcaagctgaaataactcgtactactcttcagtcagatcaagaggaaatcgattatgatgataccatatcagttgaaatgaagaaggaagattttgacatttttgatgaggatgaaaatcagagcccccgcagctttcaaaagaaaacacgacactattttattgctgcagtggagaggctctgggattatgggatgagtagctccccacatgttctaagaaacagggctcagagtggcagtgtccctcagttcaagaaagttgttttccaggaatttactgatggctcctttactcagcccttataccgtggagaactaaatgaacatttgggactcctggggccatatataagagcagaagttgaagataatatcatggtaactttcagaaatcaggcctctcgtccctattccttctattctagccttatttcttatgaggaagatcagaggcaaggagcagaacctagaaaaaactttgtcaagcctaatgaaaccaaaacttacttttggaaagtgcaacatcatatggcacccactaaagatgagtttgactgcaaagcctgggcttatttctctgatgttgacctggaaaaagatgtgcactcaggcctgattggaccccttctggtctgccacactaacacactgaaccctgctcatgggagacaagtgacagtacaggaatttgctctgtttttcaccatctttgatgagaccaaaagctggtacttcactgaaaatatggaaagaaactgcagggctccctgcaatatccagatggaagatcccacttttaaagagaattatcgcttccatgcaatcaatggctacataatggatacactacctggcttagtaatggctcaggatcaaaggattcgatggtatctgctcagcatgggcagcaatgaaaacatccattctattcatttcagtggacatgtgttcactgtacgaaaaaaagaggagtataaaatggcactgtacaatctctatccaggtgtttttgagacagtggaaatgttaccatccaaagctggaatttggcgggtggaatgccttattggcgagcatctacatgctgggatgagcacactttttctggtgtacagcaataagtgtcagactcccctgggaatggcttctggacacattagagattttcagattacagcttcaggacaatatggacagtgggccccaaagctggccagacttcattattccggatcaatcaatgcctggagcaccaaggagcccttttcttggatcaaggtggatctgttggcaccaatgattattcacggcatcaagacccagggtgcccgtcagaagttctccagcctctacatctctcagtttatcatcatgtatagtcttgatgggaagaagtggcagacttatcgaggaaattccactggaaccttaatggtcttctttggcaatgtggattcatctgggataaaacacaatatttttaaccctccaattattgctcgatacatccgtttgcacccaactcattatagcattcgcagcactcttcgcatggagttgatgggctgtgatttaaatagttgcagcatgccattgggaatggagagtaaagcaatatcagatgcacagattactgcttcatcctactttaccaatatgtttgccacctggtctccttcaaaagctcgacttcacctccaagggaggagtaatgcctggagacctcaggtgaataatccaaaagagtggctgcaagtggacttccagaagacaatgaaagtcacaggagtaactactcagggagtaaaatctctgcttaccagcatgtatgtgaaggagttcctcatctccagcagtcaagatggccatcagtggactctcttttttcagaatggcaaagtaaaggtttttcagggaaatcaagactccttcacacctgtggtgaactctctagacccaccgttactgactcgctaccttcgaattcacccccagagttgggtgcaccagattgccctgaggatggaggttctgggctgcgaggcacaggacctctacggcgcgccaggtacctcagagtctgctacccccgagtcagggccaggatcagagccagccacctccgggtctgagacacccgggacttccgagagtgccacccctgagtccggacccgggtccgagcccgccacttccggctccgaaactcccggcacaagcgagagcgctaccccagagtcaggaccaggaacatctacagagccctctgaaggctccgctccagggtccccagccggcagtcccactagcaccgaggagggaacctctgaaagcgccacacccgaatcagggccagggtctgagcctgctaccagcggcagcgagacaccaggcacctctgagtccgccacaccagagtccggacccggatctcccgctgggagccccacctccactgaggagggatctcctgctggctctccaacatctactgaggaaggtacctcaaccgagccatccgagggatcagctcccggcacctcagagtcggcaaccccggagtctggacccggaacttccgaaagtgccacaccagagtccggtcccgggacttcagaatcagcaacacccgagtccggccctgggtctgaacccgccacaagtggtagtgagacaccaggatcagaacctgctacctcagggtcagagacacccggatctccggcaggctcaccaacctccactgaggagggcaccagcacagaaccaagcgagggctccgcacccggaacaagcactgaacccagtgagggttcagcacccggctctgagccggccacaagtggcagtgagacacccggcacttcagagagtgccacccccgagagtggcccaggcactagtaccgagccctctgaaggcagtgcgccagcctcgagcgaacaaaaactcatctcagaagaggatctgtcacctgcaaccggtcatcatcaccatcaccattga

SEQ ID NO: 1137 - protein, 1903 aa, synthetic construct
  REGION 1..1903: note = Description of Artificial Sequence: Synthetic polypeptide
ATRRYYLGAVELSWDYMQSDLGELPVDARFPPRVPKSFPFNTSVVYKKTLFVEFTDHLFNIAKPRPPWMGLLGPTIQAEVYDTVVITLKNMASHPVSLHAVGVSYWKASEGAEYDDQTSQREKEDDKVFPGGSHTYVWQVLKENGPMASDPLCLTYSYLSHVDLVKDLNSGLIGALLVCREGSLAKEKTQTLHKFILLFAVFDEGKSWHSETKNSLMQDRDAASARAWPKMHTVNGYVNRSLPGLIGCHRKSVYWHVIGMGTTPEVHSIFLEGHTFLVRNHRQASLEISPITFLTAQTLLMDLGQFLLFCHISSHQHDGMEAYVKVDSCPEEPQLRMKNNEEAEDYDDDLTDSEMDVVRFDDDNSPSFIQIRSVAKKHPKTWVHYIAAEEEDWDYAPLVLAPDDRSYKSQYLNNGPQRIGRKYKKVRFMAYTDETFKTREAIQHESGILGPLLYGEVGDTLLIIFKNQASRPYNIYPHGITDVRPLYSRRLPKGVKHLKDFPILPGEIFKYKWTVTVEDGPTKSDPRCLTRYYSSFVNMERDLASGLIGPLLICYKESVDQRGNQIMSDKRNVILFSVFDENRSWYLTENIQRFLPNPAGVQLEDPEFQASNIMHSINGYVFDSLQLSVCLHEVAYWYILSIGAQTDFLSVFFSGYTFKHKMVYEDTLTLFPFSGETVFMSMENPGLWILGCHNSDFRNRGMTALLKVSSCDKNTGDYYEDSYEDISAYLLSKNNAIEPRSFSQNGAPSPAGSPTSTEEGTSESATPESGPGSEPATSGSETPGTSESATPESGPGTSTEPSEGSAPGTSTEPSEGSAPGTSTEPSEGSAPGTSTEPSEGSAPGTSTEPSEGSAPGTSTEPSEGSAPGSPAGSPTSTEEGTSTEPSEGSAPGASSPPVLKRHQREITRTTLQSDQEEIDYDDTISVEMKKEDFDIFDEDENQSPRSFQKKTRHYFIAAVERLWDYGMSSSPHVLRNRAQSGSVPQFKKVVFQEFTDGSFTQPLYRGELNEHLGLLGPYIRAEVEDNIMVTFRNQASRPYSFYSSLISYEEDQRQGAEPRKNFVKPNETKTYFWKVQHHMAPTKDEFDCKAWAYFSDVDLEKDVHSGLIGPLLVCHTNTLNPAHGRQVTVQEFALFFTIFDETKSWYFTENMERNCRAPCNIQMEDPTFKENYRFHAINGYIMDTLPGLVMAQDQRIRWYLLSMGSNENIHSIHFSGHVFTVRKKEEYKMALYNLYPGVFETVEMLPSKAGIWRVECLIGEHLHAGMSTLFLVYSNKCQTPLGMASGHIRDFQITASGQYGQWAPKLARLHYSGSINAWSTKEPFSWIKVDLLAPMIIHGIKTQGARQKFSSLYISQFIIMYSLDGKKWQTYRGNSTGTLMVFFGNVDSSGIKHNIFNPPIIARYIRLHPTHYSIRSTLRMELMGCDLNSCSMPLGMESKAISDAQITASSYFTNMFATWSPSKARLHLQGRSNAWRPQVNNPKEWLQVDFQKTMKVTGVTTQGVKSLLTSMYVKEFLISSSQDGHQWTLFFQNGKVKVFQGNQDSFTPVVNSLDPPLLTRYLRIHPQSWVHQIALRMEVLGCEAQDLYGAPGTSESATPESGPGSEPATSGSETPGTSESATPESGPGSEPATSGSETPGTSESATPESGPGTSTEPSEGSAPGSPAGSPTSTEEGTSESATPESGPGSEPATSGSETPGTSESATPESGPGSPAGSPTSTEEGSPAGSPTSTEEGTSTEPSEGSAPGTSESATPESGPGTSESATPESGPGTSESATPESGPGSEPATSGSETPGSEPATSGSETPGSPAGSPTSTEEGTSTEPSEGSAPGTSTEPSEGSAPGSEPATSGSETPGTSESATPESGPGTSTEPSEGSAPASSEQKLISEEDLSPATGHHHHHH

SEQ ID NO: 1138 - DNA, 5712 bp, synthetic construct
  misc_feature 1..5712: note = Description of Artificial Sequence: Synthetic polynucleotide
  source 1..5712: mol_type = other DNA
gccaccagaagatactacctgggtgcagtggaactgtcatgggactatatgcaaagtgatctcggtgagctgcctgtggacgcaagatttcctcctagagtgccaaaatcttttccattcaacacctcagtcgtgtacaaaaagactctgtttgtagaattcacggatcaccttttcaacatcgctaagccaaggccaccctggatgggtctgctaggtcctaccatccaggctgaggtttatgatacagtggtcattacacttaagaacatggcttcccatcctgtcagtcttcatgctgttggtgtatcctactggaaagcttctgagggagctgaatatgatgatcagaccagtcaaagggagaaagaagatgataaagtcttccctggtggaagccatacatatgtctggcaggtcctgaaagagaatggtccaatggcctctgacccactgtgccttacctactcatatctttctcatgtggacctggtaaaagacttgaattcaggcctcattggagccctactagtatgtagagaagggagtctggccaaggaaaagacacagaccttgcacaaatttatactactttttgctgtatttgatgaagggaaaagttggcactcagaaacaaagaactccttgatgcaggatagggatgctgcatctgctcgggcctggcctaaaatgcacacagtcaatggttatgtaaacaggtctctgccaggtctgattggatgccacaggaaatcagtctattggcatgtgattggaatgggcaccactcctgaagtgcactcaatattcctcgaaggtcacacatttcttgtgaggaaccatcgccaggctagcttggaaatctcgccaataactttccttactgctcaaacactcttgatggaccttggacagtttctactgttttgtcatatctcttcccaccaacatgatggcatggaagcttatgtcaaagtagacagctgtccagaggaaccccaactacgaatgaaaaataatgaagaagcggaagactatgatgatgatcttactgattctgaaatggatgtggtcaggtttgatgatgacaactctccttcctttatccaaattcgctcagttgccaagaagcatcctaaaacttgggtacattacattgctgctgaagaggaggactgggactatgctcccttagtcctcgcccccgatgacagaagttataaaagtcaatatttgaacaatggccctcagcggattggtaggaagtacaaaaaagtccgatttatggcatacacagatgaaacctttaagactcgtgaagctattcagcatgaatcaggaatcttgggacctttactttatggggaagttggagacacactgttgattatatttaagaatcaagcaagcagaccatataacatctaccctcacggaatcactgatgtccgtcctttgtattcaaggagattaccaaaaggtgtaaaacatttgaaggattttccaattctgccaggagaaatattcaaatataaatggacagtgactgtagaagatgggccaactaaatcagatcctcggtgcctgacccgctattactctagtttcgttaatatggagagagatctagcttcaggactcattggccctctcctcatctgctacaaagaatctgtagatcaaagaggaaaccagataatgtcagacaagaggaatgtcatcctgttttctgtatttgatgagaaccgaagctggtacctcacagagaatatacaacgctttctccccaatccagctggagtgcagcttgaggatccagagttccaagcctccaacatcatgcacagcatcaatggctatgtttttgatagtttgcagttgtcagtttgtttgcatgaggtggcatactggtacattctaagcattggagcacagactgacttcctttctgtcttcttctctggatataccttcaaacacaaaatggtctatgaagacacactcaccctattcccattctcaggagaaactgtcttcatgtcgatggaaaacccaggtctatggattctggggtgccacaactcagactttcggaacagaggcatgaccgccttactgaaggtttctagttgtgacaagaacactggtgattattacgaggacagttatgaagatatttcagcatacttgctgagtaaaaacaatgccattgaaccaagaagcttctctcaaaacggcgcgccaagtcccgctggaagcccaactagcaccgaagaggggacctcagagtccgccacccccgagtccggccctggctctgagcctgccactagcggctccgagactcctggcacatccgaaagcgctacacccgagagtggacccggcacctctaccgagcccagtgagggctccgcccctggaacaagcaccgagcccagcgaaggcagcgccccagggacctccacagagcccagtgaaggcagtgctcctggcaccagcaccgaaccaagcgagggctctgcacccgggacctccaccgagccaagcgaaggctctgcccctggcacttccaccgagcccagcgaaggcagcgcccctgggagccccgctggctctcccaccagcactgaggagggcacatctaccgaaccaagtgaaggctctgcaccaggtgcctcgagcccaccagtcttgaaacgccatcaacgggaaataactcgtactactcttcagtcagatcaagaggaaatcgattatgatgataccatatcagttgaaatgaagaaggaagattttgacatttttgatgaggatgaaaatcagagcccccgcagctttcaaaagaaaacacgacactattttattgctgcagtggagaggctctgggattatgggatgagtagctccccacatgttctaagaaacagggctcagagtggcagtgtccctcagttcaagaaagttgttttccaggaatttactgatggctcctttactcagcccttataccgtggagaactaaatgaacatttgggactcctggggccatatataagagcagaagttgaagataatatcatggtaactttcagaaatcaggcctctcgtccctattccttctattctagccttatttcttatgaggaagatcagaggcaaggagcagaacctagaaaaaactttgtcaagcctaatgaaaccaaaacttacttttggaaagtgcaacatcatatggcacccactaaagatgagtttgactgcaaagcctgggcttatttctctgatgttgacctggaaaaagatgtgcactcaggcctgattggaccccttctggtctgccacactaacacactgaaccctgctcatgggagacaagtgacagtacaggaatttgctctgtttttcaccatctttgatgagaccaaaagctggtacttcactgaaaatatggaaagaaactgcagggctccctgcaatatccagatggaagatcccacttttaaagagaattatcgcttccatgcaatcaatggctacataatggatacactacctggcttagtaatggctcaggatcaaaggattcgatggtatctgctcagcatgggcagcaatgaaaacatccattctattcatttcagtggacatgtgttcactgtacgaaaaaaagaggagtataaaatggcactgtacaatctctatccaggtgtttttgagacagtggaaatgttaccatccaaagctggaatttggcgggtggaatgccttattggcgagcatctacatgctgggatgagcacactttttctggtgtacagcaataagtgtcagactcccctgggaatggcttctggacacattagagattttcagattacagcttcaggacaatatggacagtgggccccaaagctggccagacttcattattccggatcaatcaatgcctggagcaccaaggagcccttttcttggatcaaggtggatctgttggcaccaatgattattcacggcatcaagacccagggtgcccgtcagaagttctccagcctctacatctctcagtttatcatcatgtatagtcttgatgggaagaagtggcagacttatcgaggaaattccactggaaccttaatggtcttctttggcaatgtggattcatctgggataaaacacaatatttttaaccctccaattattgctcgatacatccgtttgcacccaactcattatagcattcgcagcactcttcgcatggagttgatgggctgtgatttaaatagttgcagcatgccattgggaatggagagtaaagcaatatcagatgcacagattactgcttcatcctactttaccaatatgtttgccacctggtctccttcaaaagctcgacttcacctccaagggaggagtaatgcctggagacctcaggtgaataatccaaaagagtggctgcaagtggacttccagaagacaatgaaagtcacaggagtaactactcagggagtaaaatctctgcttaccagcatgtatgtgaaggagttcctcatctccagcagtcaagatggccatcagtggactctcttttttcagaatggcaaagtaaaggtttttcagggaaatcaagactccttcacacctgtggtgaactctctagacccaccgttactgactcgctaccttcgaattcacccccagagttgggtgcaccagattgccctgaggatggaggttctgggctgcgaggcacaggacctctacggcgcgccaggtacctcagagtctgctacccccgagtcagggccaggatcagagccagccacctccgggtctgagacacccgggacttccgagagtgccacccctgagtccggacccgggtccgagcccgccacttccggctccgaaactcccggcacaagcgagagcgctaccccagagtcaggaccaggaacatctacagagccctctgaaggctccgctccagggtccccagccggcagtcccactagcaccgaggagggaacctctgaaagcgccacacccgaatcagggccagggtctgagcctgctaccagcggcagcgagacaccaggcacctctgagtccgccacaccagagtccggacccggatctcccgctgggagccccacctccactgaggagggatctcctgctggctctccaacatctactgaggaaggtacctcaaccgagccatccgagggatcagctcccggcacctcagagtcggcaaccccggagtctggacccggaacttccgaaagtgccacaccagagtccggtcccgggacttcagaatcagcaacacccgagtccggccctgggtctgaacccgccacaagtggtagtgagacaccaggatcagaacctgctacctcagggtcagagacacccggatctccggcaggctcaccaacctccactgaggagggcaccagcacagaaccaagcgagggctccgcacccggaacaagcactgaacccagtgagggttcagcacccggctctgagccggccacaagtggcagtgagacacccggcacttcagagagtgccacccccgagagtggcccaggcactagtaccgagccctctgaaggcagtgcgccagcctcgagcgaacaaaaactcatctcagaagaggatctgtcacctgcaaccggtcatcatcaccatcaccattga

SEQ ID NO: 1139 - protein, 1602 aa, synthetic construct
  REGION 1..1602: note = Description of Artificial Sequence: Synthetic polypeptide
ATRRYYLGAVELSWDYMQSDLGELPVDARFPPRVPKSFPFNTSVVYKKTLFVEFTDHLFNIAKPRPPWMGLLGPTIQAEVYDTVVITLKNMASHPVSLHAVGVSYWKASEGAEYDDQTSQREKEDDKVFPGGSHTYVWQVLKENGPMASDPLCLTYSYLSHVDLVKDLNSGLIGALLVCREGSLAKEKTQTLHKFILLFAVFDEGKSWHSETKNSLMQDRDAASARAWPKMHTVNGYVNRSLPGLIGCHRKSVYWHVIGMGTTPEVHSIFLEGHTFLVRNHRQASLEISPITFLTAQTLLMDLGQFLLFCHISSHQHDGMEAYVKVDSCPEEPQLRMKNNEEAEDYDDDLTDSEMDVVRFDDDNSPSFIQIRSVAKKHPKTWVHYIAAEEEDWDYAPLVLAPDDRSYKSQYLNNGPQRIGRKYKKVRFMAYTDETFKTREAIQHESGILGPLLYGEVGDTLLIIFKNQASRPYNIYPHGITDVRPLYSRRLPKGVKHLKDFPILPGEIFKYKWTVTVEDGPTKSDPRCLTRYYSSFVNMERDLASGLIGPLLICYKESVDQRGNQIMSDKRNVILFSVFDENRSWYLTENIQRFLPNPAGVQLEDPEFQASNIMHSINGYVFDSLQLSVCLHEVAYWYILSIGAQTDFLSVFFSGYTFKHKMVYEDTLTLFPFSGETVFMSMENPGLWILGCHNSDFRNRGMTALLKVSSCDKNTGDYYEDSYEDISAYLLSKNNAIEPRSFSQNGAPGTPGSGTASSSPGASPGTSSTGSPGASPGTSSTGSPGASPGTSSTGSPGSSPSASTGTGPGTPGSGTASSSPGASPGTSSTGSPGASPGTSSTGSPGASPGTSSTGSPGSSTPSGATGSPGSSTPSGATGSPGASPGTSSTGSPASSSDQEEIDYDDTISVEMKKEDFDIYDEDENQSPRSFQKKTRHYFIAAVERLWDYGMSSSPHVLRNRAQSGSVPQFKKVVFQEFTDGSFTQPLYRGELNEHLGLLGPYIRAEVEDNIMVTFRNQASRPYSFYSSLISYEEDQRQGAEPRKNFVKPNETKTYFWKVQHHMAPTKDEFDCKAWAYFSDVDLEKDVHSGLIGPLLVCHTNTLNPAHGRQVTVQEFALFFTIFDETKSWYFTENMERNCRAPCNIQMEDPTFKENYRFHAINGYIMDTLPGLVMAQDQRIRWYLLSMGSNENIHSIHFSGHVFTVRKKEEYKMALYNLYPGVFETVEMLPSKAGIWRVECLIGEHLHAGMSTLFLVYSNKCQTPLGMASGHIRDFQITASGQYGQWAPKLARLHYSGSINAWSTKEPFSWIKVDLLAPMIIHGIKTQGARQKFSSLYISQFIIMYSLDGKKWQTYRGNSTGTLMVFFGNVDSSGIKHNIFNPPIIARYIRLHPTHYSIRSTLRMELMGCDLNSCSMPLGMESKAISDAQITASSYFTNMFATWSPSKARLHLQGRSNAWRPQVNNPKEWLQVDFQKTMKVTGVTTQGVKSLLTSMYVKEFLISSSQDGHQWTLFFQNGKVKVFQGNQDSFTPVVNSLDPPLLTRYLRIHPQSWVHQIALRMEVLGCEAQDLYGAGSPGAETAEQKLISEEDLSPATGHHHHHH

SEQ ID NO: 1140 - DNA, 4809 bp, synthetic construct
  misc_feature 1..4809: note = Description of Artificial Sequence: Synthetic polynucleotide
  source 1..4809: mol_type = other DNA
gccaccagaagatactacctgggtgcagtggaactgtcatgggactatatgcaaagtgatctcggtgagctgcctgtggacgcaagatttcctcctagagtgccaaaatcttttccattcaacacctcagtcgtgtacaaaaagactctgtttgtagaattcacggatcaccttttcaacatcgctaagccaaggccaccctggatgggtctgctaggtcctaccatccaggctgaggtttatgatacagtggtcattacacttaagaacatggcttcccatcctgtcagtcttcatgctgttggtgtatcctactggaaagcttctgagggagctgaatatgatgatcagaccagtcaaagggagaaagaagatgataaagtcttccctggtggaagccatacatatgtctggcaggtcctgaaagagaatggtccaatggcctctgacccactgtgccttacctactcatatctttctcatgtggacctggtaaaagacttgaattcaggcctcattggagccctactagtatgtagagaagggagtctggccaaggaaaagacacagaccttgcacaaatttatactactttttgctgtatttgatgaagggaaaagttggcactcagaaacaaagaactccttgatgcaggatagggatgctgcatctgctcgggcctggcctaaaatgcacacagtcaatggttatgtaaacaggtctctgccaggtctgattggatgccacaggaaatcagtctattggcatgtgattggaatgggcaccactcctgaagtgcactcaatattcctcgaaggtcacacatttcttgtgaggaaccatcgccaggctagcttggaaatctcgccaataactttccttactgctcaaacactcttgatggaccttggacagtttctactgttttgtcatatctcttcccaccaacatgatggcatggaagcttatgtcaaagtagacagctgtccagaggaaccccaactacgaatgaaaaataatgaagaagcggaagactatgatgatgatcttactgattctgaaatggatgtggtcaggtttgatgatgacaactctccttcctttatccaaattcgctcagttgccaagaagcatcctaaaacttgggtacattacattgctgctgaagaggaggactgggactatgctcccttagtcctcgcccccgatgacagaagttataaaagtcaatatttgaacaatggccctcagcggattggtaggaagtacaaaaaagtccgatttatggcatacacagatgaaacctttaagactcgtgaagctattcagcatgaatcaggaatcttgggacctttactttatggggaagttggagacacactgttgattatatttaagaatcaagcaagcagaccatataacatctaccctcacggaatcactgatgtccgtcctttgtattcaaggagattaccaaaaggtgtaaaacatttgaaggattttccaattctgccaggagaaatattcaaatataaatggacagtgactgtagaagatgggccaactaaatcagatcctcggtgcctgacccgctattactctagtttcgttaatatggagagagatctagcttcaggactcattggccctctcctcatctgctacaaagaatctgtagatcaaagaggaaaccagataatgtcagacaagaggaatgtcatcctgttttctgtatttgatgagaaccgaagctggtacctcacagagaatatacaacgctttctccccaatccagctggagtgcagcttgaggatccagagttccaagcctccaacatcatgcacagcatcaatggctatgtttttgatagtttgcagttgtcagtttgtttgcatgaggtggcatactggtacattctaagcattggagcacagactgacttcctttctgtcttcttctctggatataccttcaaacacaaaatggtctatgaagacacactcaccctattcccattctcaggagaaactgtcttcatgtcgatggaaaacccaggtctatggattctggggtgccacaactcagactttcggaacagaggcatgaccgccttactgaaggtttctagttgtgacaagaacactggtgattattacgaggacagttatgaagatatttcagcatacttgctgagtaaaaacaatgccattgaaccaagaagcttctctcaaaacggcgcgccaggtacacccggatcgggtacagcgtcatcgagccccggtgcgtcacctggtacgtcgagcacggggtcgccaggggcgtcccctgggacgtcctcaacaggctcgcccggtgcgtcacccggcacgtcgtccacgggttcacctggtagctccccttccgcgtccactggcaccgggcctggaactccggggagcggcacagcgagctcgtcgccgggagcatcgcctgggacatcgagcaccgggtcgccaggagcatcgcccggaacatccagcacaggaagccccggcgcgtcgcccgggacatcaagcacaggttccccgggatcgagcacgccgtccggagccactggatcaccagggagctcgacaccttccggcgcaacgggatcgcccggagccagcccgggtacgtcaagcactggctcccctgcctcgagctcagatcaagaggaaatcgattatgatgataccatatcagttgaaatgaagaaggaagattttgacatttatgatgaggatgaaaatcagagcccccgcagctttcaaaagaaaacacgacactattttattgctgcagtggagaggctctgggattatgggatgagtagctccccacatgttctaagaaacagggctcagagtggcagtgtccctcagttcaagaaagttgttttccaggaatttactgatggctcctttactcagcccttataccgtggagaactaaatgaacatttgggactcctggggccatatataagagcagaagttgaagataatatcatggtaactttcagaaatcaggcctctcgtccctattccttctattctagccttatttcttatgaggaagatcagaggcaaggagcagaacctagaaaaaactttgtcaagcctaatgaaaccaaaacttacttttggaaagtgcaacatcatatggcacccactaaagatgagtttgactgcaaagcctgggcttatttctctgatgttgacctggaaaaagatgtgcactcaggcctgattggaccccttctggtctgccacactaacacactgaaccctgctcatgggagacaagtgacagtacaggaatttgctctgtttttcaccatctttgatgagaccaaaagctggtacttcactgaaaatatggaaagaaactgcagggctccctgcaatatccagatggaagatcccacttttaaagagaattatcgcttccatgcaatcaatggctacataatggatacactacctggcttagtaatggctcaggatcaaaggattcgatggtatctgctcagcatgggcagcaatgaaaacatccattctattcatttcagtggacatgtgttcactgtacgaaaaaaagaggagtataaaatggcactgtacaatctctatccaggtgtttttgagacagtggaaatgttaccatccaaagctggaatttggcgggtggaatgccttattggcgagcatctacatgctgggatgagcacactttttctggtgtacagcaataagtgtcagactcccctgggaatggcttctggacacattagagattttcagattacagcttcaggacaatatggacagtgggccccaaagctggccagacttcattattccggatcaatcaatgcctggagcaccaaggagcccttttcttggatcaaggtggatctgttggcaccaatgattattcacggcatcaagacccagggtgcccgtcagaagttctccagcctctacatctctcagtttatcatcatgtatagtcttgatgggaagaagtggcagacttatcgaggaaattccactggaaccttaatggtcttctttggcaatgtggattcatctgggataaaacacaatatttttaaccctccaattattgctcgatacatccgtttgcacccaactcattatagcattcgcagcactcttcgcatggagttgatgggctgtgatttaaatagttgcagcatgccattgggaatggagagtaaagcaatatcagatgcacagattactgcttcatcctactttaccaatatgtttgccacctggtctccttcaaaagctcgacttcacctccaagggaggagtaatgcctggagacctcaggtgaataatccaaaagagtggctgcaagtggacttccagaagacaatgaaagtcacaggagtaactactcagggagtaaaatctctgcttaccagcatgtatgtgaaggagttcctcatctccagcagtcaagatggccatcagtggactctcttttttcagaatggcaaagtaaaggtttttcagggaaatcaagactccttcacacctgtggtgaactctctagacccaccgttactgactcgctaccttcgaattcacccccagagttgggtgcaccagattgccctgaggatggaggttctgggctgcgaggcacaggacctctacggcgccggatcacctggggccgaaacggccgaacaaaaactcatctcagaagaggatctgtcacctgcaaccggtcatcatcaccatcaccattga

SEQ ID NO: 1141 - protein, 1886 aa, synthetic construct
  REGION 1..1886: note = Description of Artificial Sequence: Synthetic polypeptide
ATRRYYLGAVELSWDYMQSDLGELPVDARFPPRVPKSFPFNTSVVYKKTLFVEFTDHLFNIAKPRPPWMGLLGPTIQAEVYDTVVITLKNMASHPVSLHAVGVSYWKASEGAEYDDQTSQREKEDDKVFPGGSHTYVWQVLKENGPMASDPLCLTYSYLSHVDLVKDLNSGLIGALLVCREGSLAKEKTQTLHKFILLFAVFDEGKSWHSETKNSLMQDRDAASARAWPKMHTVNGYVNRSLPGLIGCHRKSVYWHVIGMGTTPEVHSIFLEGHTFLVRNHRQASLEISPITFLTAQTLLMDLGQFLLFCHISSHQHDGMEAYVKVDSCPEEPQLRMKNNEEAEDYDDDLTDSEMDVVRFDDDNSPSFIQIRSVAKKHPKTWVHYIAAEEEDWDYAPLVLAPDDRSYKSQYLNNGPQRIGRKYKKVRFMAYTDETFKTREAIQHESGILGPLLYGEVGDTLLIIFKNQASRPYNIYPHGITDVRPLYSRRLPKGVKHLKDFPILPGEIFKYKWTVTVEDGPTKSDPRCLTRYYSSFVNMERDLASGLIGPLLICYKESVDQRGNQIMSDKRNVILFSVFDENRSWYLTENIQRFLPNPAGVQLEDPEFQASNIMHSINGYVFDSLQLSVCLHEVAYWYILSIGAQTDFLSVFFSGYTFKHKMVYEDTLTLFPFSGETVFMSMENPGLWILGCHNSDFRNRGMTALLKVSSCDKNTGDYYEDSYEDISAYLLSKNNAIEPRSFSQNGAPGTPGSGTASSSPGASPGTSSTGSPGASPGTSSTGSPGASPGTSSTGSPGSSPSASTGTGPGTPGSGTASSSPGASPGTSSTGSPGASPGTSSTGSPGASPGTSSTGSPGSSTPSGATGSPGSSTPSGATGSPGASPGTSSTGSPASSSDQEEIDYDDTISVEMKKEDFDIYDEDENQSPRSFQKKTRHYFIAAVERLWDYGMSSSPHVLRNRAQSGSVPQFKKVVFQEFTDGSFTQPLYRGELNEHLGLLGPYIRAEVEDNIMVTFRNQASRPYSFYSSLISYEEDQRQGAEPRKNFVKPNETKTYFWKVQHHMAPTKDEFDCKAWAYFSDVDLEKDVHSGLIGPLLVCHTNTLNPAHGRQVTVQEFALFFTIFDETKSWYFTENMERNCRAPCNIQMEDPTFKENYRFHAINGYIMDTLPGLVMAQDQRIRWYLLSMGSNENIHSIHFSGHVFTVRKKEEYKMALYNLYPGVFETVEMLPSKAGIWRVECLIGEHLHAGMSTLFLVYSNKCQTPLGMASGHIRDFQITASGQYGQWAPKLARLHYSGSINAWSTKEPFSWIKVDLLAPMIIHGIKTQGARQKFSSLYISQFIIMYSLDGKKWQTYRGNSTGTLMVFFGNVDSSGIKHNIFNPPIIARYIRLHPTHYSIRSTLRMELMGCDLNSCSMPLGMESKAISDAQITASSYFTNMFATWSPSKARLHLQGRSNAWRPQVNNPKEWLQVDFQKTMKVTGVTTQGVKSLLTSMYVKEFLISSSQDGHQWTLFFQNGKVKVFQGNQDSFTPVVNSLDPPLLTRYLRIHPQSWVHQIALRMEVLGCEAQDLYGAPGTSESATPESGPGSEPATSGSETPGTSESATPESGPGSEPATSGSETPGTSESATPESGPGTSTEPSEGSAPGSPAGSPTSTEEGTSESATPESGPGSEPATSGSETPGTSESATPESGPGSPAGSPTSTEEGSPAGSPTSTEEGTSTEPSEGSAPGTSESATPESGPGTSESATPESGPGTSESATPESGPGSEPATSGSETPGSEPATSGSETPGSPAGSPTSTEEGTSTEPSEGSAPGTSTEPSEGSAPGSEPATSGSETPGTSESATPESGPGTSTEPSEGSAPASSEQKLISEEDLSPATGHHHHHH

SEQ ID NO: 1142 - DNA, 5661 bp, synthetic construct
  misc_feature 1..5661: note = Description of Artificial Sequence: Synthetic polynucleotide
  source 1..5661: mol_type = other DNA
gccaccagaagatactacctgggtgcagtggaactgtcatgggactatatgcaaagtgatctcggtgagctgcctgtggacgcaagatttcctcctagagtgccaaaatcttttccattcaacacctcagtcgtgtacaaaaagactctgtttgtagaattcacggatcaccttttcaacatcgctaagccaaggccaccctggatgggtctgctaggtcctaccatccaggctgaggtttatgatacagtggtcattacacttaagaacatggcttcccatcctgtcagtcttcatgctgttggtgtatcctactggaaagcttctgagggagctgaatatgatgatcagaccagtcaaagggagaaagaagatgataaagtcttccctggtggaagccatacatatgtctggcaggtcctgaaagagaatggtccaatggcctctgacccactgtgccttacctactcatatctttctcatgtggacctggtaaaagacttgaattcaggcctcattggagccctactagtatgtagagaagggagtctggccaaggaaaagacacagaccttgcacaaatttatactactttttgctgtatttgatgaagggaaaagttggcactcagaaacaaagaactccttgatgcaggatagggatgctgcatctgctcgggcctggcctaaaatgcacacagtcaatggttatgtaaacaggtctctgccaggtctgattggatgccacaggaaatcagtctattggcatgtgattggaatgggcaccactcctgaagtgcactcaatattcctcgaaggtcacacatttcttgtgaggaaccatcgccaggctagcttggaaatctcgccaataactttccttactgctcaaacactcttgatggaccttggacagtttctactgttttgtcatatctcttcccaccaacatgatggcatggaagcttatgtcaaagtagacagctgtccagaggaaccccaactacgaatgaaaaataatgaagaagcggaagactatgatgatgatcttactgattctgaaatggatgtggtcaggtttgatgatgacaactctccttcctttatccaaattcgctcagttgccaagaagcatcctaaaacttgggtacattacattgctgctgaagaggaggactgggactatgctcccttagtcctcgcccccgatgacagaagttataaaagtcaatatttgaacaatggccctcagcggattggtaggaagtacaaaaaagtccgatttatggcatacacagatgaaacctttaagactcgtgaagctattcagcatgaatcaggaatcttgggacctttactttatggggaagttggagacacactgttgattatatttaagaatcaagcaagcagaccatataacatctaccctcacggaatcactgatgtccgtcctttgtattcaaggagattaccaaaaggtgtaaaacatttgaaggattttccaattctgccaggagaaatattcaaatataaatggacagtgactgtagaagatgggccaactaaatcagatcctcggtgcctgacccgctattactctagtttcgttaatatggagagagatctagcttcaggactcattggccctctcctcatctgctacaaagaatctgtagatcaaagaggaaaccagataatgtcagacaagaggaatgtcatcctgttttctgtatttgatgagaaccgaagctggtacctcacagagaatatacaacgctttctccccaatccagctggagtgcagcttgaggatccagagttccaagcctccaacatcatgcacagcatcaatggctatgtttttgatagtttgcagttgtcagtttgtttgcatgaggtggcatactggtacattctaagcattggagcacagactgacttcctttctgtcttcttctctggatataccttcaaacacaaaatggtctatgaagacacactcaccctattcccattctcaggagaaactgtcttcatgtcgatggaaaacccaggtctatggattctggggtgccacaactcagactttcggaacagaggcatgaccgccttactgaaggtttctagttgtgacaagaacactggtgattattacgaggacagttatgaagatatttcagcatacttgctgagtaaaaacaatgccattgaaccaagaagcttctctcaaaacggcgcgccaggtacacccggatcgggtacagcgtcatcgagccccggtgcgtcacctggtacgtcgagcacggggtcgccaggggcgtcccctgggacgtcctcaacaggctcgcccggtgcgtcacccggcacgtcgtccacgggttcacctggtagctccccttccgcgtccactggcaccgggcctggaactccggggagcggcacagcgagctcgtcgccgggagcatcgcctgggacatcgagcaccgggtcgccaggagcatcgcccggaacatccagcacaggaagccccggcgcgtcgcccgggacatcaagcacaggttccccgggatcgagcacgccgtccggagccactggatcaccagggagctcgacaccttccggcgcaacgggatcgcccggagccagcccgggtacgtcaagcactggctcccctgcctcgagctcagatcaagaggaaatcgattatgatgataccatatcagttgaaatgaagaaggaagattttgacatttatgatgaggatgaaaatcagagcccccgcagctttcaaaagaaaacacgacactattttattgctgcagtggagaggctctgggattatgggatgagtagctccccacatgttctaagaaacagggctcagagtggcagtgtccctcagttcaagaaagttgttttccaggaatttactgatggctcctttactcagcccttataccgtggagaactaaatgaacatttgggactcctggggccatatataagagcagaagttgaagataatatcatggtaactttcagaaatcaggcctctcgtccctattccttctattctagccttatttcttatgaggaagatcagaggcaaggagcagaacctagaaaaaactttgtcaagcctaatgaaaccaaaacttacttttggaaagtgcaacatcatatggcacccactaaagatgagtttgactgcaaagcctgggcttatttctctgatgttgacctggaaaaagatgtgcactcaggcctgattggaccccttctggtctgccacactaacacactgaaccctgctcatgggagacaagtgacagtacaggaatttgctctgtttttcaccatctttgatgagaccaaaagctggtacttcactgaaaatatggaaagaaactgcagggctccctgcaatatccagatggaagatcccacttttaaagagaattatcgcttccatgcaatcaatggctacataatggatacactacctggcttagtaatggctcaggatcaaaggattcgatggtatctgctcagcatgggcagcaatgaaaacatccattctattcatttcagtggacatgtgttcactgtacgaaaaaaagaggagtataaaatggcactgtacaatctctatccaggtgtttttgagacagtggaaatgttaccatccaaagctggaatttggcgggtggaatgccttattggcgagcatctacatgctgggatgagcacactttttctggtgtacagcaataagtgtcagactcccctgggaatggcttctggacacattagagattttcagattacagcttcaggacaatatggacagtgggccccaaagctggccagacttcattattccggatcaatcaatgcctggagcaccaaggagcccttttcttggatcaaggtggatctgttggcaccaatgattattcacggcatcaagacccagggtgcccgtcagaagttctccagcctctacatctctcagtttatcatcatgtatagtcttgatgggaagaagtggcagacttatcgaggaaattccactggaaccttaatggtcttctttggcaatgtggattcatctgggataaaacacaatatttttaaccctccaattattgctcgatacatccgtttgcacccaactcattatagcattcgcagcactcttcgcatggagttgatgggctgtgatttaaatagttgcagcatgccattgggaatggagagtaaagcaatatcagatgcacagattactgcttcatcctactttaccaatatgtttgccacctggtctccttcaaaagctcgacttcacctccaagggaggagtaatgcctggagacctcaggtgaataatccaaaagagtggctgcaagtggacttccagaagacaatgaaagtcacaggagtaactactcagggagtaaaatctctgcttaccagcatgtatgtgaaggagttcctcatctccagcagtcaagatggccatcagtggactctcttttttcagaatggcaaagtaaaggtttttcagggaaatcaagactccttcacacctgtggtgaactctctagacccaccgttactgactcgctaccttcgaattcacccccagagttgggtgcaccagattgccctgaggatggaggttctgggctgcgaggcacaggacctctacggcgcgccaggtacctcagagtctgctacccccgagtcagggccaggatcagagccagccacctccgggtctgagacacccgggacttccgagagtgccacccctgagtccggacccgggtccgagcccgccacttccggctccgaaactcccggcacaagcgagagcgctaccccagagtcaggaccaggaacatctacagagccctctgaaggctccgctccagggtccccagccggcagtcccactagcaccgaggagggaacctctgaaagcgccacacccgaatcagggccagggtctgagcctgctaccagcggcagcgagacaccaggcacctctgagtccgccacaccagagtccggacccggatctcccgctgggagccccacctccactgaggagggatctcctgctggctctccaacatctactgaggaaggtacctcaaccgagccatccgagggatcagctcccggcacctcagagtcggcaaccccggagtctggacccggaacttccgaaagtgccacaccagagtccggtcccgggacttcagaatcagcaacacccgagtccggccctgggtctgaacccgccacaagtggtagtgagacaccaggatcagaacctgctacctcagggtcagagacacccggatctccggcaggctcaccaacctccactgaggagggcaccagcacagaaccaagcgagggctccgcacccggaacaagcactgaacccagtgagggttcagcacccggctctgagccggccacaagtggcagtgagacacccggcacttcagagagtgccacccccgagagtggcccaggcactagtaccgagccctctgaaggcagtgcgccagcctcgagcgaacaaaaactcatctcagaagaggatctgtcacctgcaaccggtcatcatcaccatcaccattga

SEQ ID NO: 1143 - protein, 2053 aa, synthetic construct
  REGION 1..2053: note = Description of Artificial Sequence: Synthetic polypeptide
ATRRYYLGAVELSWDYMQSDLGELPVDARFPPRVPKSFPFNTSVVYKKTLFVEFTDHLFNIAKPRPPWMGLLGPTIQAEVYDTVVITLKNMASHPVSLHAVGVSYWKASEGAEYDDQTSQREKEDDKVFPGGSHTYVWQVLKENGPMASDPLCLTYSYLSHVDLVKDLNSGLIGALLVCREGSLAKEKTQTLHKFILLFAVFDEGKSWHSETKNSLMQDRDAASARAWPKMHTVNGYVNRSLPGLIGCHRKSVYWHVIGMGTTPEVHSIFLEGHTFLVRNHRQASLEISPITFLTAQTLLMDLGQFLLFCHISSHQHDGMEAYVKVDSCPEEPQLRMKNNEEAEDYDDDLTDSEMDVVRFDDDNSPSFIQIRSVAKKHPKTWVHYIAAEEEDWDYAPLVLAPDGAPTSTEPSEGSAPGSPAGSPTSTEEGTSTEPSEGSAPGTSTEPSEGSAPGTSESATPESGPGTSTEPSEGSAPGTSESATPESGPGSEPATSGSETPGTSTEPSEGSAPGTSTEPSEGSAPGTSESATPESGPGTSESATPESGPGASSDRSYKSQYLNNGPQRIGRKYKKVRFMAYTDETFKTREAIQHESGILGPLLYGEVGDTLLIIFKNQASRPYNIYPHGITDVRPLYSRRLPKGVKHLKDFPILPGEIFKYKWTVTVEDGPTKSDPRCLTRYYSSFVNMERDLASGLIGPLLICYKESVDQRGNQIMSDKRNVILFSVFDENRSWYLTENIQRFLPNPAGVQLEDPEFQASNIMHSINGYVFDSLQLSVCLHEVAYWYILSIGAQTDFLSVFFSGYTFKHKMVYEDTLTLFPFSGETVFMSMENPGLWILGCHNSDFRNRGMTALLKVSSCDKNTGDYYEDSYEDISAYLLSKNNAIEPRSFSQNGAPSPAGSPTSTEEGTSESATPESGPGSEPATSGSETPGTSESATPESGPGTSTEPSEGSAPGTSTEPSEGSAPGTSTEPSEGSAPGTSTEPSEGSAPGTSTEPSEGSAPGTSTEPSEGSAPGSPAGSPTSTEEGTSTEPSEGSAPGASSPPVLKRHQAEITRTTLQSDQEEIDYDDTISVEMKKEDFDIYDEDENQSPRSFQKKTRHYFIAAVERLWDYGMSSSPHVLRNRAQSGSVPQFKKVVFQEFTDGSFTQPLYRGELNEHLGLLGPYIRAEVEDNIMVTFRNQASRPYSFYSSLISYEEDQRQGAEPRKNFVKPNETKTYFWKVQHHMAPTKDEFDCKAWAYFSDVDLEKDVHSGLIGPLLVCHTNTLNPAHGRQVTVQEFALFFTIFDETKSWYFTENMERNCRAPCNIQMEDPTFKENYRFHAINGYIMDTLPGLVMAQDQRIRWYLLSMGSNENIHSIHFSGHVFTVRKKEEYKMALYNLYPGVFETVEMLPSKAGIWRVECLIGEHLHAGMSTLFLVYSNKCQTPLGMASGHIRDFQITASGQYGQWAPKLARLHYSGSINAWSTKEPFSWIKVDLLAPMIIHGIKTQGARQKFSSLYISQFIIMYSLDGKKWQTYRGNSTGTLMVFFGNVDSSGIKHNIFNPPIIARYIRLHPTHYSIRSTLRMELMGCDLNSCSMPLGMESKAISDAQITASSYFTNMFATWSPSKARLHLQGRSNAWRPQVNNPKEWLQVDFQKTMKVTGVTTQGVKSLLTSMYVKEFLISSSQDGHQWTLFFQNGKVKVFQGNQDSFTPVVNSLDPPLLTRYLRIHPQSWVHQIALRMEVLGCEAQDLYGAPGTSESATPESGPGSEPATSGSETPGTSESATPESGPGSEPATSGSETPGTSESATPESGPGTSTEPSEGSAPGSPAGSPTSTEEGTSESATPESGPGSEPATSGSETPGTSESATPESGPGSPAGSPTSTEEGSPAGSPTSTEEGTSTEPSEGSAPGTSESATPESGPGTSESATPESGPGTSESATPESGPGSEPATSGSETPGSEPATSGSETPGSPAGSPTSTEEGTSTEPSEGSAPGTSTEPSEGSAPGSEPATSGSETPGTSESATPESGPGTSTEPSEGSAPASSEQKLISEEDLSPATGHHHHHH

SEQ ID NO: 1144 - DNA, 6162 bp, synthetic construct
  misc_feature 1..6162: note = Description of Artificial Sequence: Synthetic polynucleotide
  source 1..6162: mol_type = other DNA
gccaccagaagatactacctgggtgcagtggaactgtcatgggactatatgcaaagtgatctcggtgagctgcctgtggacgcaagatttcctcctagagtgccaaaatcttttccattcaacacctcagtcgtgtacaaaaagactctgtttgtagaattcacggatcaccttttcaacatcgctaagccaaggccaccctggatgggtctgctaggtcctaccatccaggctgaggtttatgatacagtggtcattacacttaagaacatggcttcccatcctgtcagtcttcatgctgttggtgtatcctactggaaagcttctgagggagctgaatatgatgatcagaccagtcaaagggagaaagaagatgataaagtcttccctggtggaagccatacatatgtctggcaggtcctgaaagagaatggtccaatggcctctgacccactgtgccttacctactcatatctttctcatgtggacctggtaaaagacttgaattcaggcctcattggagccctactagtatgtagagaagggagtctggccaaggaaaagacacagaccttgcacaaatttatactactttttgctgtatttgatgaagggaaaagttggcactcagaaacaaagaactccttgatgcaggatagggatgctgcatctgctcgggcctggcctaaaatgcacacagtcaatggttatgtaaacaggtctctgccaggtctgattggatgccacaggaaatcagtctattggcatgtgattggaatgggcaccactcctgaagtgcactcaatattcctcgaaggtcacacatttcttgtgaggaaccatcgccaggctagcttggaaatctcgccaataactttccttactgctcaaacactcttgatggaccttggacagtttctactgttttgtcatatctcttcccaccaacatgatggcatggaagcttatgtcaaagtagacagctgtccagaggaaccccaactacgaatgaaaaataatgaagaagcggaagactatgatgatgatcttactgattctgaaatggatgtggtcaggtttgatgatgacaactctccttcctttatccaaattcgctcagttgccaagaagcatcctaaaacttgggtacattacattgctgctgaagaggaggactgggactatgctcccttagtcctcgcccccgatggcgcgccaaccagtacggagccgtccgaggggagcgcaccaggaagcccggctgggagcccgacttctaccgaagagggtacatctaccgaaccaagtgaaggttcagcaccaggcacctcaacagaaccctctgagggctcggcgcctggtacaagtgagtccgccaccccagaatccgggcctgggacaagcacagaaccttcggaagggagtgcccctggaacatccgaatcggcaaccccagaatcagggccaggatctgagcccgcgacttcgggctccgagacgcctgggacatccaccgagccctccgaaggatcagccccaggcaccagcacggagccctctgagggaagcgcacctggtaccagcgaaagcgcaactcccgaatcaggtcccggtacgagcgagtcggcgaccccggagagcgggccaggtgcctcgagcgacagaagttataaaagtcaatatttgaacaatggccctcagcggattggtaggaagtacaaaaaagtccgatttatggcatacacagatgaaacctttaagactcgtgaagctattcagcatgaatcaggaatcttgggacctttactttatggggaagttggagacacactgttgattatatttaagaatcaagcaagcagaccatataacatctaccctcacggaatcactgatgtccgtcctttgtattcaaggagattaccaaaaggtgtaaaacatttgaaggattttccaattctgccaggagaaatattcaaatataaatggacagtgactgtagaagatgggccaactaaatcagatcctcggtgcctgacccgctattactctagtttcgttaatatggagagagatctagcttcaggactcattggccctctcctcatctgctacaaagaatctgtagatcaaagaggaaaccagataatgtcagacaagaggaatgtcatcctgttttctgtatttgatgagaaccgaagctggtacctcacagagaatatacaacgctttctccccaatccagctggagtgcagcttgaggatccagagttccaagcctccaacatcatgcacagcatcaatggctatgtttttgatagtttgcagttgtcagtttgtttgcatgaggtggcatactggtacattctaagcattggagcacagactgacttcctttctgtcttcttctctggatataccttcaaacacaaaatggtctatgaagacacactcaccctattcccattctcaggagaaactgtcttcatgtcgatggaaaacccaggtctatggattctggggtgccacaactcagactttcggaacagaggcatgaccgccttactgaaggtttctagttgtgacaagaacactggtgattattacgaggacagttatgaagatatttcagcatacttgctgagtaaaaacaatgccattgaaccaagaagcttctctcaaaacggcgcgccaagtcccgctggaagcccaactagcaccgaagaggggacctcagagtccgccacccccgagtccggccctggctctgagcctgccactagcggctccgagactcctggcacatccgaaagcgctacacccgagagtggacccggcacctctaccgagcccagtgagggctccgcccctggaacaagcaccgagcccagcgaaggcagcgccccagggacctccacagagcccagtgaaggcagtgctcctggcaccagcaccgaaccaagcgagggctctgcacccgggacctccaccgagccaagcgaaggctctgcccctggcacttccaccgagcccagcgaaggcagcgcccctgggagccccgctggctctcccaccagcactgaggagggcacatctaccgaaccaagtgaaggctctgcaccaggtgcctcgagcccaccagtcttgaaacgccatcaagctgaaataactcgtactactcttcagtcagatcaagaggaaatcgattatgatgataccatatcagttgaaatgaagaaggaagattttgacatttatgatgaggatgaaaatcagagcccccgcagctttcaaaagaaaacacgacactattttattgctgcagtggagaggctctgggattatgggatgagtagctccccacatgttctaagaaacagggctcagagtggcagtgtccctcagttcaagaaagttgttttccaggaatttactgatggctcctttactcagcccttataccgtggagaactaaatgaacatttgggactcctggggccatatataagagcagaagttgaagataatatcatggtaactttcagaaatcaggcctctcgtccctattccttctattctagccttatttcttatgaggaagatcagaggcaaggagcagaacctagaaaaaactttgtcaagcctaatgaaaccaaaacttacttttggaaagtgcaacatcatatggcacccactaaagatgagtttgactgcaaagcctgggcttatttctctgatgttgacctggaaaaagatgtgcactcaggcctgattggaccccttctggtctgccacactaacacactgaaccctgctcatgggagacaagtgacagtacaggaatttgctctgtttttcaccatctttgatgagaccaaaagctggtacttcactgaaaatatggaaagaaactgcagggctccctgcaatatccagatggaagatcccacttttaaagagaattatcgcttccatgcaatcaatggctacataatggatacactacctggcttagtaatggctcaggatcaaaggattcgatggtatctgctcagcatgggcagcaatgaaaacatccattctattcatttcagtggacatgtgttcactgtacgaaaaaaagaggagtataaaatggcactgtacaatctctatccaggtgtttttgagacagtggaaatgttaccatccaaagctggaatttggcgggtggaatgccttattggcgagcatctacatgctgggatgagcacactttttctggtgtacagcaataagtgtcagactcccctgggaatggcttctggacacattagagattttcagattacagcttcaggacaatatggacagtgggccccaaagctggccagacttcattattccggatcaatcaatgcctggagcaccaaggagcccttttcttggatcaaggtggatctgttggcaccaatgattattcacggcatcaagacccagggtgcccgtcagaagttctccagcctctacatctctcagtttatcatcatgtatagtcttgatgggaagaagtggcagacttatcgaggaaattccactggaaccttaatggtcttctttggcaatgtggattcatctgggataaaacacaatatttttaaccctccaattattgctcgatacatccgtttgcacccaactcattatagcattcgcagcactcttcgcatggagttgatgggctgtgatttaaatagttgcagcatgccattgggaatggagagtaaagcaatatcagatgcacagattactgcttcatcctactttaccaatatgtttgccacctggtctccttcaaaagctcgacttcacctccaagggaggagtaatgcctggagacctcaggtgaataatccaaaagagtggctgcaagtggacttccagaagacaatgaaagtcacaggagtaactactcagggagtaaaatctctgcttaccagcatgtatgtgaaggagttcctcatctccagcagtcaagatggccatcagtggactctcttttttcagaatggcaaagtaaaggtttttcagggaaatcaagactccttcacacctgtggtgaactctctagacccaccgttactgactcgctaccttcgaattcacccccagagttgggtgcaccagattgccctgaggatggaggttctgggctgcgaggcacaggacctctacggcgcgccaggtacctcagagtctgctacccccgagtcagggccaggatcagagccagccacctccgggtctgagacacccgggacttccgagagtgccacccctgagtccggacccgggtccgagcccgccacttccggctccgaaactcccggcacaagcgagagcgctaccccagagtcaggaccaggaacatctacagagccctctgaaggctccgctccagggtccccagccggcagtcccactagcaccgaggagggaacctctgaaagcgccacacccgaatcagggccagggtctgagcctgctaccagcggcagcgagacaccaggcacctctgagtccgccacaccagagtccggacccggatctcccgctgggagccccacctccactgaggagggatctcctgctggctctccaacatctactgaggaaggtacctcaaccgagccatccgagggatcagctcccggcacctcagagtcggcaaccccggagtctggacccggaacttccgaaagtgccacaccagagtccggtcccgggacttcagaatcagcaacacccgagtccggccctgggtctgaacccgccacaagtggtagtgagacaccaggatcagaacctgctacctcagggtcagagacacccggatctccggcaggctcaccaacctccactgaggagggcaccagcacagaaccaagcgagggctccgcacccggaacaagcactgaacccagtgagggttcagcacccggctctgagccggccacaagtggcagtgagacacccggcacttcagagagtgccacccccgagagtggcccaggcactagtaccgagccctctgaaggcagtgcgccagcctcgagcgaacaaaaactcatctcagaagaggatctgtcacctgcaaccggtcatcatcaccatcaccattga

SEQ ID NO: 1145 - protein, 2053 aa, synthetic construct
  REGION 1..2053: note = Description of Artificial Sequence: Synthetic polypeptide
ATRRYYLGAVELSWDYMQSDLGELPVDARFPPRVPKSFPFNTSVVYKKTLFVEFTDHLFNIAKPRPPWMGLLGPTIQAEVYDTVVITLKNMASHPVSLHAVGVSYWKASEGAEYDDQTSQREKEDDKVFPGGSHTYVWQVLKENGPMASDPLCLTYSYLSHVDLVKDLNSGLIGALLVCREGSLAKEKTQTLHKFILLFAVFDEGKSWHSETKNSLMQDRDAASARAWPKMHTVNGYVNRSLPGLIGCHRKSVYWHVIGMGTTPEVHSIFLEGHTFLVRNHRQASLEISPITFLTAQTLLMDLGQFLLFCHISSHQHDGMEAYVKVDSCPEEPQLRMKNNEEAEDYDDDLTDSEMDVVRFDDDNSPSFIQIRSVAKKHPKTWVHYIAAEEEDWDYAPLVLAPDDRSYKSGAPTSTEPSEGSAPGSPAGSPTSTEEGTSTEPSEGSAPGTSTEPSEGSAPGTSESATPESGPGTSTEPSEGSAPGTSESATPESGPGSEPATSGSETPGTSTEPSEGSAPGTSTEPSEGSAPGTSESATPESGPGTSESATPESGPGASSQYLNNGPQRIGRKYKKVRFMAYTDETFKTREAIQHESGILGPLLYGEVGDTLLIIFKNQASRPYNIYPHGITDVRPLYSRRLPKGVKHLKDFPILPGEIFKYKWTVTVEDGPTKSDPRCLTRYYSSFVNMERDLASGLIGPLLICYKESVDQRGNQIMSDKRNVILFSVFDENRSWYLTENIQRFLPNPAGVQLEDPEFQASNIMHSINGYVFDSLQLSVCLHEVAYWYILSIGAQTDFLSVFFSGYTFKHKMVYEDTLTLFPFSGETVFMSMENPGLWILGCHNSDFRNRGMTALLKVSSCDKNTGDYYEDSYEDISAYLLSKNNAIEPRSFSQNGAPSPAGSPTSTEEGTSESATPESGPGSEPATSGSETPGTSESATPESGPGTSTEPSEGSAPGTSTEPSEGSAPGTSTEPSEGSAPGTSTEPSEGSAPGTSTEPSEGSAPGTSTEPSEGSAPGSPAGSPTSTEEGTSTEPSEGSAPGASSPPVLKRHQAEITRTTLQSDQEEIDYDDTISVEMKKEDFDIYDEDENQSPRSFQKKTRHYFIAAVERLWDYGMSSSPHVLRNRAQSGSVPQFKKVVFQEFTDGSFTQPLYRGELNEHLGLLGPYIRAEVEDNIMVTFRNQASRPYSFYSSLISYEEDQRQGAEPRKNFVKPNETKTYFWKVQHHMAPTKDEFDCKAWAYFSDVDLEKDVHSGLIGPLLVCHTNTLNPAHGRQVTVQEFALFFTIFDETKSWYFTENMERNCRAPCNIQMEDPTFKENYRFHAINGYIMDTLPGLVMAQDQRIRWYLLSMGSNENIHSIHFSGHVFTVRKKEEYKMALYNLYPGVFETVEMLPSKAGIWRVECLIGEHLHAGMSTLFLVYSNKCQTPLGMASGHIRDFQITASGQYGQWAPKLARLHYSGSINAWSTKEPFSWIKVDLLAPMIIHGIKTQGARQKFSSLYISQFIIMYSLDGKKWQTYRGNSTGTLMVFFGNVDSSGIKHNIFNPPIIARYIRLHPTHYSIRSTLRMELMGCDLNSCSMPLGMESKAISDAQITASSYFTNMFATWSPSKARLHLQGRSNAWRPQVNNPKEWLQVDFQKTMKVTGVTTQGVKSLLTSMYVKEFLISSSQDGHQWTLFFQNGKVKVFQGNQDSFTPVVNSLDPPLLTRYLRIHPQSWVHQIALRMEVLGCEAQDLYGAPGTSESATPESGPGSEPATSGSETPGTSESATPESGPGSEPATSGSETPGTSESATPESGPGTSTEPSEGSAPGSPAGSPTSTEEGTSESATPESGPGSEPATSGSETPGTSESATPESGPGSPAGSPTSTEEGSPAGSPTSTEEGTSTEPSEGSAPGTSESATPESGPGTSESATPESGPGTSESATPESGPGSEPATSGSETPGSEPATSGSETPGSPAGSPTSTEEGTSTEPSEGSAPGTSTEPSEGSAPGSEPATSGSETPGTSESATPESGPGTSTEPSEGSAPASSEQKLISEEDLSPATGHHHHHH

SEQ ID NO: 1146 - DNA, 6162 bp, synthetic construct
  misc_feature 1..6162: note = Description of Artificial Sequence: Synthetic polynucleotide
  source 1..6162: mol_type = other DNA
gccaccagaagatactacctgggtgcagtggaactgtcatgggactatatgcaaagtgatctcggtgagctgcctgtggacgcaagatttcctcctagagtgccaaaatcttttccattcaacacctcagtcgtgtacaaaaagactctgtttgtagaattcacggatcaccttttcaacatcgctaagccaaggccaccctggatgggtctgctaggtcctaccatccaggctgaggtttatgatacagtggtcattacacttaagaacatggcttcccatcctgtcagtcttcatgctgttggtgtatcctactggaaagcttctgagggagctgaatatgatgatcagaccagtcaaagggagaaagaagatgataaagtcttccctggtggaagccatacatatgtctggcaggtcctgaaagagaatggtccaatggcctctgacccactgtgccttacctactcatatctttctcatgtggacctggtaaaagacttgaattcaggcctcattggagccctactagtatgtagagaagggagtctggccaaggaaaagacacagaccttgcacaaatttatactactttttgctgtatttgatgaagggaaaagttggcactcagaaacaaagaactccttgatgcaggatagggatgctgcatctgctcgggcctggcctaaaatgcacacagtcaatggttatgtaaacaggtctctgccaggtctgattggatgccacaggaaatcagtctattggcatgtgattggaatgggcaccactcctgaagtgcactcaatattcctcgaaggtcacacatttcttgtgaggaaccatcgccaggctagcttggaaatctcgccaataactttccttactgctcaaacactcttgatggaccttggacagtttctactgttttgtcatatctcttcccaccaacatgatggcatggaagcttatgtcaaagtagacagctgtccagaggaaccccaactacgaatgaaaaataatgaagaagcggaagactatgatgatgatcttactgattctgaaatggatgtggtcaggtttgatgatgacaactctccttcctttatccaaattcgctcagttgccaagaagcatcctaaaacttgggtacattacattgctgctgaagaggaggactgggactatgctcccttagtcctcgcccccgatgacagaagttataaaagtggcgcgccaaccagtacggagccgtccgaggggagcgcaccaggaagcccggctgggagcccgacttctaccgaagagggtacatctaccgaaccaagtgaaggttcagcaccaggcacctcaacagaaccctctgagggctcggcgcctggtacaagtgagtccgccaccccagaatccgggcctgggacaagcacagaaccttcggaagggagtgcccctggaacatccgaatcggcaaccccagaatcagggccaggatctgagcccgcgacttcgggctccgagacgcctgggacatccaccgagccctccgaaggatcagccccaggcaccagcacggagccctctgagggaagcgcacctggtaccagcgaaagcgcaactcccgaatcaggtcccggtacgagcgagtcggcgaccccggagagcgggccaggtgcctcgagccaatatttgaacaatggccctcagcggattggtaggaagtacaaaaaagtccgatttatggcatacacagatgaaacctttaagactcgtgaagctattcagcatgaatcaggaatcttgggacctttactttatggggaagttggagacacactgttgattatatttaagaatcaagcaagcagaccatataacatctaccctcacggaatcactgatgtccgtcctttgtattcaaggagattaccaaaaggtgtaaaacatttgaaggattttccaattctgccaggagaaatattcaaatataaatggacagtgactgtagaagatgggccaactaaatcagatcctcggtgcctgacccgctattactctagtttcgttaatatggagagagatctagcttcaggactcattggccctctcctcatctgctacaaagaatctgtagatcaaagaggaaaccagataatgtcagacaagaggaatgtcatcctgttttctgtatttgatgagaaccgaagctggtacctcacagagaatatacaacgctttctccccaatccagctggagtgcagcttgaggatccagagttccaagcctccaacatcatgcacagcatcaatggctatgtttttgatagtttgcagttgtcagtttgtttgcatgaggtggcatactggtacattctaagcattggagcacagactgacttcctttctgtcttcttctctggatataccttcaaacacaaaatggtctatgaagacacactcaccctattcccattctcaggagaaactgtcttcatgtcgatggaaaacccaggtctatggattctggggtgccacaactcagactttcggaacagaggcatgaccgccttactgaaggtttctagttgtgacaagaacactggtgattattacgaggacagttatgaagatatttcagcatacttgctgagtaaaaacaatgccattgaaccaagaagcttctctcaaaacggcgcgccaagtcccgctggaagcccaactagcaccgaagaggggacctcagagtccgccacccccgagtccggccctggctctgagcctgccactagcggctccgagactcctggcacatccgaaagcgctacacccgagagtggacccggcacctctaccgagcccagtgagggctccgcccctggaacaagcaccgagcccagcgaaggcagcgccccagggacctccacagagcccagtgaaggcagtgctcctggcaccagcaccgaaccaagcgagggctctgcacccgggacctccaccgagccaagcgaaggctctgcccctggcacttccaccgagcccagcgaaggcagcgcccctgggagccccgctggctctcccaccagcactgaggagggcacatctaccgaaccaagtgaaggctctgcaccaggtgcctcgagcccaccagtcttgaaacgccatcaagctgaaataactcgtactactcttcagtcagatcaagaggaaatcgattatgatgataccatatcagttgaaatgaagaaggaagattttgacatttatgatgaggatgaaaatcagagcccccgcagctttcaaaagaaaacacgacactattttattgctgcagtggagaggctctgggattatgggatgagtagctccccacatgttctaagaaacagggctcagagtggcagtgtccctcagttcaagaaagttgttttccaggaatttactgatggctcctttactcagcccttataccgtggagaactaaatgaacatttgggactcctggggccatatataagagcagaagttgaagataatatcatggtaactttcagaaatcaggcctctcgtccctattccttctattctagccttatttcttatgaggaagatcagaggcaaggagcagaacctagaaaaaactttgtcaagcctaatgaaaccaaaacttacttttggaaagtgcaacatcatatggcacccactaaagatgagtttgactgcaaagcctgggcttatttctctgatgttgacctggaaaaagatgtgcactcaggcctgattggaccccttctggtctgccacactaacacactgaaccctgctcatgggagacaagtgacagtacaggaatttgctctgtttttcaccatctttgatgagaccaaaagctggtacttcactgaaaatatggaaagaaactgcagggctccctgcaatatccagatggaagatcccacttttaaagagaattatcgcttccatgcaatcaatggctacataatggatacactacctggcttagtaatggctcaggatcaaaggattcgatggtatctgctcagcatgggcagcaatgaaaacatccattctattcatttcagtggacatgtgttcactgtacgaaaaaaagaggagtataaaatggcactgtacaatctctatccaggtgtttttgagacagtggaaatgttaccatccaaagctggaatttggcgggtggaatgccttattggcgagcatctacatgctgggatgagcacactttttctggtgtacagcaataagtgtcagactcccctgggaatggcttctggacacattagagattttcagattacagcttcaggacaatatggacagtgggccccaaagctggccagacttcattattccggatcaatcaatgcctggagcaccaaggagcccttttcttggatcaaggtggatctgttggcaccaatgattattcacggcatcaagacccagggtgcccgtcagaagttctccagcctctacatctctcagtttatcatcatgtatagtcttgatgggaagaagtggcagacttatcgaggaaattccactggaaccttaatggtcttctttggcaatgtggattcatctgggataaaacacaatatttttaaccctccaattattgctcgatacatccgtttgcacccaactcattatagcattcgcagcactcttcgcatggagttgatgggctgtgatttaaatagttgcagcatgccattgggaatggagagtaaagcaatatcagatgcacagattactgcttcatcctactttaccaatatgtttgccacctggtctccttcaaaagctcgacttcacctccaagggaggagtaatgcctggagacctcaggtgaataatccaaaagagtggctgcaagtggacttccagaagacaatgaaagtcacaggagtaactactcagggagtaaaatctctgcttaccagcatgtatgtgaaggagttcctcatctccagcagtcaagatggccatcagtggactctcttttttcagaatggcaaagtaaaggtttttcagggaaatcaagactccttcacacctgtggtgaactctctagacccaccgttactgactcgctaccttcgaattcacccccagagttgggtgcaccagattgccctgaggatggaggttctgggctgcgaggcacaggacctctacggcgcgccaggtacctcagagtctgctacccccgagtcagggccaggatcagagccagccacctccgggtctgagacacccgggacttccgagagtgccacccctgagtccggacccgggtccgagcccgccacttccggctccgaaactcccggcacaagcgagagcgctaccccagagtcaggaccaggaacatctacagagccctctgaaggctccgctccagggtccccagccggcagtcccactagcaccgaggagggaacctctgaaagcgccacacccgaatcagggccagggtctgagcctgctaccagcggcagcgagacaccaggcacctctgagtccgccacaccagagtccggacccggatctcccgctgggagccccacctccactgaggagggatctcctgctggctctccaacatctactgaggaaggtacctcaaccgagccatccgagggatcagctcccggcacctcagagtcggcaaccccggagtctggacccggaacttccgaaagtgccacaccagagtccggtcccgggacttcagaatcagcaacacccgagtccggccctgggtctgaacccgccacaagtggtagtgagacaccaggatcagaacctgctacctcagggtcagagacacccggatctccggcaggctcaccaacctccactgaggagggcaccagcacagaaccaagcgagggctccgcacccggaacaagcactgaacccagtgagggttcagcacccggctctgagccggccacaagtggcagtgagacacccggcacttcagagagtgccacccccgagagtggcccaggcactagtaccgagccctctgaaggcagtgcgccagcctcgagcgaacaaaaactcatctcagaagaggatctgtcacctgcaaccggtcatcatcaccatcaccattga

SEQ ID NO: 1147 - protein, 1619 aa, synthetic construct
  REGION 1..1619: note = Description of Artificial Sequence: Synthetic polypeptide
ATRRYYLGAVELSWDYMQSDLGELPVDARFPPRVPKSFPFNTSVVYKKTLFVEFTDHLFNIAKPRPPWMGLLGPTIQAEVYDTVVITLKNMASHPVSLHAVGVSYWKASEGAEYDDQTSQREKEDDKVFPGGSHTYVWQVLKENGPMASDPLCLTYSYLSHVDLVKDLNSGLIGALLVCREGSLAKEKTQTLHKFILLFAVFDEGKSWHSETKNSLMQDRDAASARAWPKMHTVNGYVNRSLPGLIGCHRKSVYWHVIGMGTTPEVHSIFLEGHTFLVRNHRQASLEISPITFLTAQTLLMDLGQFLLFCHISSHQHDGMEAYVKVDSCPEEPQLRMKNNEEAEDYDDDLTDSEMDVVRFDDDNSPSFIQIRSVAKKHPKTWVHYIAAEEEDWDYAPLVLAPDDRSYKSGAPGASPGTSSTGSPGSSPSASTGTGPGSSPSASTGTGPGTPGSGTASSSPGSSTPSGATGSPGSSPSASTGTGPGASPGTSSTGSPGTPGSGTASSSPGSSTPSGATGSPGTPGSGTASSSPGASPGTSSTGSPGASPGTSSTGSPASSQYLNNGPQRIGRKYKKVRFMAYTDETFKTREAIQHESGILGPLLYGEVGDTLLIIFKNQASRPYNIYPHGITDVRPLYSRRLPKGVKHLKDFPILPGEIFKYKWTVTVEDGPTKSDPRCLTRYYSSFVNMERDLASGLIGPLLICYKESVDQRGNQIMSDKRNVILFSVFDENRSWYLTENIQRFLPNPAGVQLEDPEFQASNIMHSINGYVFDSLQLSVCLHEVAYWYILSIGAQTDFLSVFFSGYTFKHKMVYEDTLTLFPFSGETVFMSMENPGLWILGCHNSDFRNRGMTALLKVSSCDKNTGDYYEDSYEDISAYLLSKNNAIEPRSFSQNPPVLKRHQREITRTTLQSDQEEIDYDDTISVEMKKEDFDIYDEDENQSPRSFQKKTRHYFIAAVERLWDYGMSSSPHVLRNRAQSGSVPQFKKVVFQEFTDGSFTQPLYRGELNEHLGLLGPYIRAEVEDNIMVTFRNQASRPYSFYSSLISYEEDQRQGAEPRKNFVKPNETKTYFWKVQHHMAPTKDEFDCKAWAYFSDVDLEKDVHSGLIGPLLVCHTNTLNPAHGRQVTVQEFALFFTIFDETKSWYFTENMERNCRAPCNIQMEDPTFKENYRFHAINGYIMDTLPGLVMAQDQRIRWYLLSMGSNENIHSIHFSGHVFTVRKKEEYKMALYNLYPGVFETVEMLPSKAGIWRVECLIGEHLHAGMSTLFLVYSNKCQTPLGMASGHIRDFQITASGQYGQWAPKLARLHYSGSINAWSTKEPFSWIKVDLLAPMIIHGIKTQGARQKFSSLYISQFIIMYSLDGKKWQTYRGNSTGTLMVFFGNVDSSGIKHNIFNPPIIARYIRLHPTHYSIRSTLRMELMGCDLNSCSMPLGMESKAISDAQITASSYFTNMFATWSPSKARLHLQGRSNAWRPQVNNPKEWLQVDFQKTMKVTGVTTQGVKSLLTSMYVKEFLISSSQDGHQWTLFFQNGKVKVFQGNQDSFTPVVNSLDPPLLTRYLRIHPQSWVHQIALRMEVLGCEAQDLYGAGSPGAETAEQKLISEEDLSPATGHHHHHH

SEQ ID NO: 1148 - DNA, 4860 bp, synthetic construct
  misc_feature 1..4860: note = Description of Artificial Sequence: Synthetic polynucleotide
  source 1..4860: mol_type = other DNA
gccaccagaagatactacctgggtgcagtggaactgtcatgggactatatgcaaagtgatctcggtgagctgcctgtggacgcaagatttcctcctagagtgccaaaatcttttccattcaacacctcagtcgtgtacaaaaagactctgtttgtagaattcacggatcaccttttcaacatcgctaagccaaggccaccctggatgggtctgctaggtcctaccatccaggctgaggtttatgatacagtggtcattacacttaagaacatggcttcccatcctgtcagtcttcatgctgttggtgtatcctactggaaagcttctgagggagctgaatatgatgatcagaccagtcaaagggagaaagaagatgataaagtcttccctggtggaagccatacatatgtctggcaggtcctgaaagagaatggtccaatggcctctgacccactgtgccttacctactcatatctttctcatgtggacctggtaaaagacttgaattcaggcctcattggagccctactagtatgtagagaagggagtctggccaaggaaaagacacagaccttgcacaaatttatactactttttgctgtatttgatgaagggaaaagttggcactcagaaacaaagaactccttgatgcaggatagggatgctgcatctgctcgggcctggcctaaaatgcacacagtcaatggttatgtaaacaggtctctgccaggtctgattggatgccacaggaaatcagtctattggcatgtgattggaatgggcaccactcctgaagtgcactcaatattcctcgaaggtcacacatttcttgtgaggaaccatcgccaggctagcttggaaatctcgccaataactttccttactgctcaaacactcttgatggaccttggacagtttctactgttttgtcatatctcttcccaccaacatgatggcatggaagcttatgtcaaagtagacagctgtccagaggaaccccaactacgaatgaaaaataatgaagaagcggaagactatgatgatgatcttactgattctgaaatggatgtggtcaggtttgatgatgacaactctccttcctttatccaaattcgctcagttgccaagaagcatcctaaaacttgggtacattacattgctgctgaagaggaggactgggactatgctcccttagtcctcgcccccgatgacagaagttataaaagtggcgcgccaggtgcctcgccgggaacatcatcaactggttcacccgggtcatccccctcggcctcaaccgggacgggtcccggctcatcccccagcgccagcactggaacaggtcctggcactcctggttccggtacggcatcgtcatccccgggaagctcaacaccgtccggagcgacaggatcacctggctcgtcaccttcggcgtcaactggaacggggccaggggcctcacccggaacgtcctcgactgggtcgcctggtacgccgggatcaggaacggcctcatcctcgcctgggtcctcaacgccctcgggtgcgactggttcgccgggaactcctggctcggggacggcctcgtcgtcgcctggggcatcaccggggacgagctccacggggtcccctggagcgtcaccggggacctcctcgacaggtagcccggcctcgagccaatatttgaacaatggccctcagcggattggtaggaagtacaaaaaagtccgatttatggcatacacagatgaaacctttaagactcgtgaagctattcagcatgaatcaggaatcttgggacctttactttatggggaagttggagacacactgttgattatatttaagaatcaagcaagcagaccatataacatctaccctcacggaatcactgatgtccgtcctttgtattcaaggagattaccaaaaggtgtaaaacatttgaaggattttccaattctgccaggagaaatattcaaatataaatggacagtgactgtagaagatgggccaactaaatcagatcctcggtgcctgacccgctattactctagtttcgttaatatggagagagatctagcttcaggactcattggccctctcctcatctgctacaaagaatctgtagatcaaagaggaaaccagataatgtcagacaagaggaatgtcatcctgttttctgtatttgatgagaaccgaagctggtacctcacagagaatatacaacgctttctccccaatccagctggagtgcagcttgaggatccagagttccaagcctccaacatcatgcacagcatcaatggctatgtttttgatagtttgcagttgtcagtttgtttgcatgaggtggcatactggtacattctaagcattggagcacagactgacttcctttctgtcttcttctctggatataccttcaaacacaaaatggtctatgaagacacactcaccctattcccattctcaggagaaactgtcttcatgtcgatggaaaacccaggtctatggattctggggtgccacaactcagactttcggaacagaggcatgaccgccttactgaaggtttctagttgtgacaagaacactggtgattattacgaggacagttatgaagatatttcagcatacttgctgagtaaaaacaatgccattgaaccaagaagcttctctcaaaacccaccagtcttgaaacgccatcaacgggaaataactcgtactactcttcagtcagatcaagaggaaatcgattatgatgataccatatcagttgaaatgaagaaggaagattttgacatttatgatgaggatgaaaatcagagcccccgcagctttcaaaagaaaacacgacactattttattgctgcagtggagaggctctgggattatgggatgagtagctccccacatgttctaagaaacagggctcagagtggcagtgtccctcagttcaagaaagttgttttccaggaatttactgatggctcctttactcagcccttataccgtggagaactaaatgaacatttgggactcctggggccatatataagagcagaagttgaagataatatcatggtaactttcagaaatcaggcctctcgtccctattccttctattctagccttatttcttatgaggaagatcagaggcaaggagcagaacctagaaaaaactttgtcaagcctaatgaaaccaaaacttacttttggaaagtgcaacatcatatggcacccactaaagatgagtttgactgcaaagcctgggcttatttctctgatgttgacctggaaaaagatgtgcactcaggcctgattggaccccttctggtctgccacactaacacactgaaccctgctcatgggagacaagtgacagtacaggaatttgctctgtttttcaccatctttgatgagaccaaaagctggtacttcactgaaaatatggaaagaaactgcagggctccctgcaatatccagatggaagatcccacttttaaagagaattatcgcttccatgcaatcaatggctacataatggatacactacctggcttagtaatggctcaggatcaaaggattcgatggtatctgctcagcatgggcagcaatgaaaacatccattctattcatttcagtggacatgtgttcactgtacgaaaaaaagaggagtataaaatggcactgtacaatctctatccaggtgtttttgagacagtggaaatgttaccatccaaagctggaatttggcgggtggaatgccttattggcgagcatctacatgctgggatgagcacactttttctggtgtacagcaataagtgtcagactcccctgggaatggcttctggacacattagagattttcagattacagcttcaggacaatatggacagtgggccccaaagctggccagacttcattattccggatcaatcaatgcctggagcaccaaggagcccttttcttggatcaaggtggatctgttggcaccaatgattattcacggcatcaagacccagggtgcccgtcagaagttctccagcctctacatctctcagtttatcatcatgtatagtcttgatgggaagaagtggcagacttatcgaggaaattccactggaaccttaatggtcttctttggcaatgtggattcatctgggataaaacacaatatttttaaccctccaattattgctcgatacatccgtttgcacccaactcattatagcattcgcagcactcttcgcatggagttgatgggctgtgatttaaatagttgcagcatgccattgggaatggagagtaaagcaatatcagatgcacagattactgcttcatcctactttaccaatatgtttgccacctggtctccttcaaaagctcgacttcacctccaagggaggagtaatgcctggagacctcaggtgaataatccaaaagagtggctgcaagtggacttccagaagacaatgaaagtcacaggagtaactactcagggagtaaaatctctgcttaccagcatgtatgtgaaggagttcctcatctccagcagtcaagatggccatcagtggactctcttttttcagaatggcaaagtaaaggtttttcagggaaatcaagactccttcacacctgtggtgaactctctagacccaccgttactgactcgctaccttcgaattcacccccagagttgggtgcaccagattgccctgaggatggaggttctgggctgcgaggcacaggacctctacggcgccggatcacctggggccgaaacggccgaacaaaaactcatctcagaagaggatctgtcacctgcaaccggtcatcatcaccatcaccattga

SEQ ID NO: 1149 - protein, 2203 aa, synthetic construct
  REGION 1..2203: note = Description of Artificial Sequence: Synthetic polypeptide
ATRRYYLGAVELSWDYMQGAPGSSPSASTGTGPGSSPSASTGTGPGASPGTSSTGSPGASPGTSSTGSPGSSTPSGATGSPGSSPSASTGTGPGASPGTSSTGSPGSSPSASTGTGPGTPGSGTASSSPGSSTPSGATGSPGSSTPSGATGSPGASPGTSSTGSPASSSDLGELPVDARFPPRVPKSFPFNTSVVYKKTLFVEFTDHLFNIAKPRPPWMGLLGPTIQAEVYDTVVITLKNMASHPVSLHAVGVSYWKASEGAEYDDQTSQREKEDDKVFPGGSHTYVWQVLKENGPMASDPLCLTYSYLSHVDLVKDLNSGLIGALLVCREGSLAKEKTQTLHKFILLFAVFDEGKSWHSETKNSLMQDRDAASARAWPKMHTVNGYVNRSLPGLIGCHRKSVYWHVIGMGTTPEVHSIFLEGHTFLVRNHRQASLEISPITFLTAQTLLMDLGQFLLFCHISSHQHDGMEAYVKVDSCPEEPQLRMKNNEEAEDYDDDLTDSEMDVVRFDDDNSPSFIQIRSVAKKHPKTWVHYIAAEEEDWDYAPLVLAPDGAPTSTEPSEGSAPGSPAGSPTSTEEGTSTEPSEGSAPGTSTEPSEGSAPGTSESATPESGPGTSTEPSEGSAPGTSESATPESGPGSEPATSGSETPGTSTEPSEGSAPGTSTEPSEGSAPGTSESATPESGPGTSESATPESGPGASSDRSYKSQYLNNGPQRIGRKYKKVRFMAYTDETFKTREAIQHESGILGPLLYGEVGDTLLIIFKNQASRPYNIYPHGITDVRPLYSRRLPKGVKHLKDFPILPGEIFKYKWTVTVEDGPTKSDPRCLTRYYSSFVNMERDLASGLIGPLLICYKESVDQRGNQIMSDKRNVILFSVFDENRSWYLTENIQRFLPNPAGVQLEDPEFQASNIMHSINGYVFDSLQLSVCLHEVAYWYILSIGAQTDFLSVFFSGYTFKHKMVYEDTLTLFPFSGETVFMSMENPGLWILGCHNSDFRNRGMTALLKVSSCDKNTGDYYEDSYEDISAYLLSKNNAIEPRSFSQNPPVLKRHQREITRTTLQGAPGTPGSGTASSSPGASPGTSSTGSPGASPGTSSTGSPGASPGTSSTGSPGSSPSASTGTGPGTPGSGTASSSPGASPGTSSTGSPGASPGTSSTGSPGASPGTSSTGSPGSSTPSGATGSPGSSTPSGATGSPGASPGTSSTGSPASSSDQEEIDYDDTISVEMKKEDFDIYDEDENQSPRSFQKKTRHYFIAAVERLWDYGMSSSPHVLRNRAQSGSVPQFKKVVFQEFTDGSFTQPLYRGELNEHLGLLGPYIRAEVEDNIMVTFRNQASRPYSFYSSLISYEEDQRQGAEPRKNFVKPNETKTYFWKVQHHMAPTKDEFDCKAWAYFSDVDLEKDVHSGLIGPLLVCHTNTLNPAHGRQVTVQEFALFFTIFDETKSWYFTENMERNCRAPCNIQMEDPTFKENYRFHAINGYIMDTLPGLVMAQDQRIRWYLLSMGSNENIHSIHFSGHVFTVRKKEEYKMALYNLYPGVFETVEMLPSKAGIWRVECLIGEHLHAGMSTLFLVYSNKCQTPLGMASGHIRDFQITASGQYGQWAPKLARLHYSGSINAWSTKEPFSWIKVDLLAPMIIHGIKTQGARQKFSSLYISQFIIMYSLDGKKWQTYRGNSTGTLMVFFGNVDSSGIKHNIFNPPIIARYIRLHPTHYSIRSTLRMELMGCDLNSCSMPLGMESKAISDAQITASSYFTNMFATWSPSKARLHLQGRSNAWRPQVNNPKEWLQVDFQKTMKVTGVTTQGVKSLLTSMYVKEFLISSSQDGHQWTLFFQNGKVKVFQGNQDSFTPVVNSLDPPLLTRYLRIHPQSWVHQIALRMEVLGCEAQDLYGAPGTSESATPESGPGSEPATSGSETPGTSESATPESGPGSEPATSGSETPGTSESATPESGPGTSTEPSEGSAPGSPAGSPTSTEEGTSESATPESGPGSEPATSGSETPGTSESATPESGPGSPAGSPTSTEEGSPAGSPTSTEEGTSTEPSEGSAPGTSESATPESGPGTSESATPESGPGTSESATPESGPGSEPATSGSETPGSEPATSGSETPGSPAGSPTSTEEGTSTEPSEGSAPGTSTEPSEGSAPGSEPATSGSETPGTSESATPESGPGTSTEPSEGSAPASSEQKLISEEDLSPATGHHHHHH

SEQ ID NO: 1150 - DNA, 6612 bp, synthetic construct
  misc_feature 1..6612: note = Description of Artificial Sequence: Synthetic polynucleotide
  source 1..6612: mol_type = other DNA
gccaccagaagatactacctgggtgcagtggaactgtcatgggactatatgcaaggcgcgccaggctccagcccctccgcgagcacgggaaccggaccaggttcgtcaccctcagcatcaacggggacgggaccgggggcgtcaccaggaacgtcctccaccggctcgccgggtgcatcacccggaacgtcatcgaccggatcgccagggagctcgacgccatcaggcgcaacaggatcacctggctcaagccctagcgcgtcaaccggcacgggtccgggtgcctcccctggcacgtccagcaccggatcacccggatcgagcccatccgcctcaaccggaaccggacccggtacaccagggtcgggaacagcctcctcgtcaccaggctcctcaaccccctcgggagccacgggttcgcccggttcgtcaacgccttccggagcaactggtagccccggagcatcgccaggaacttcgagcacggggtcgcccgcctcgagcagtgatctcggtgagctgcctgtggacgcaagatttcctcctagagtgccaaaatcttttccattcaacacctcagtcgtgtacaaaaagactctgtttgtagaattcacggatcaccttttcaacatcgctaagccaaggccaccctggatgggtctgctaggtcctaccatccaggctgaggtttatgatacagtggtcattacacttaagaacatggcttcccatcctgtcagtcttcatgctgttggtgtatcctactggaaagcttctgagggagctgaatatgatgatcagaccagtcaaagggagaaagaagatgataaagtcttccctggtggaagccatacatatgtctggcaggtcctgaaagagaatggtccaatggcctctgacccactgtgccttacctactcatatctttctcatgtggacctggtaaaagacttgaattcaggcctcattggagccctactagtatgtagagaagggagtctggccaaggaaaagacacagaccttgcacaaatttatactactttttgctgtatttgatgaagggaaaagttggcactcagaaacaaagaactccttgatgcaggatagggatgctgcatctgctcgggcctggcctaaaatgcacacagtcaatggttatgtaaacaggtctctgccaggtctgattggatgccacaggaaatcagtctattggcatgtgattggaatgggcaccactcctgaagtgcactcaatattcctcgaaggtcacacatttcttgtgaggaaccatcgccaggctagcttggaaatctcgccaataactttccttactgctcaaacactcttgatggaccttggacagtttctactgttttgtcatatctcttcccaccaacatgatggcatggaagcttatgtcaaagtagacagctgtccagaggaaccccaactacgaatgaaaaataatgaagaagcggaagactatgatgatgatcttactgattctgaaatggatgtggtcaggtttgatgatgacaactctccttcctttatccaaattcgctcagttgccaagaagcatcctaaaacttgggtacattacattgctgctgaagaggaggactgggactatgctcccttagtcctcgcccccgatggcgcgccaaccagtacggagccgtccgaggggagcgcaccaggaagcccggctgggagcccgacttctaccgaagagggtacatctaccgaaccaagtgaaggttcagcaccaggcacctcaacagaaccctctgagggctcggcgcctggtacaagtgagtccgccaccccagaatccgggcctgggacaagcacagaaccttcggaagggagtgcccctggaacatccgaatcggcaaccccagaatcagggccaggatctgagcccgcgacttcgggctccgagacgcctgggacatccaccgagccctccgaaggatcagccccaggcaccagcacggagccctctgagggaagcgcacctggtaccagcgaaagcgcaactcccgaatcaggtcccggtacgagcgagtcggcgaccccggagagcgggccaggtgcctcgagcgacagaagttataaaagtcaatatttgaacaatggccctcagcggattggtaggaagtacaaaaaagtccgatttatggcatacacagatgaaacctttaagactcgtgaagctattcagcatgaatcaggaatcttgggacctttactttatggggaagttggagacacactgttgattatatttaagaatcaagcaagcagaccatataacatctaccctcacggaatcactgatgtccgtcctttgtattcaaggagattaccaaaaggtgtaaaacatttgaaggattttccaattctgccaggagaaatattcaaatataaatggacagtgactgtagaagatgggccaactaaatcagatcctcggtgcctgacccgctattactctagtttcgttaatatggagagagatctagcttcaggactcattggccctctcctcatctgctacaaagaatctgtagatcaaagaggaaaccagataatgtcagacaagaggaatgtcatcctgttttctgtatttgatgagaaccgaagctggtacctcacagagaatatacaacgctttctccccaatccagctggagtgcagcttgaggatccagagttccaagcctccaacatcatgcacagcatcaatggctatgtttttgatagtttgcagttgtcagtttgtttgcatgaggtggcatactggtacattctaagcattggagcacagactgacttcctttctgtcttcttctctggatataccttcaaacacaaaatggtctatgaagacacactcaccctattcccattctcaggagaaactgtcttcatgtcgatggaaaacccaggtctatggattctggggtgccacaactcagactttcggaacagaggcatgaccgccttactgaaggtttctagttgtgacaagaacactggtgattattacgaggacagttatgaagatatttcagcatacttgctgagtaaaaacaatgccattgaaccaagaagcttctctcaaaacccaccagtcttgaaacgccatcaacgggaaataactcgtactactcttcagggcgcgccaggtacacccggatcgggtacagcgtcatcgagccccggtgcgtcacctggtacgtcgagcacggggtcgccaggggcgtcccctgggacgtcctcaacaggctcgcccggtgcgtcacccggcacgtcgtccacgggttcacctggtagctccccttccgcgtccactggcaccgggcctggaactccggggagcggcacagcgagctcgtcgccgggagcatcgcctgggacatcgagcaccgggtcgccaggagcatcgcccggaacatccagcacaggaagccccggcgcgtcgcccgggacatcaagcacaggttccccgggatcgagcacgccgtccggagccactggatcaccagggagctcgacaccttccggcgcaacgggatcgcccggagccagcccgggtacgtcaagcactggctcccctgcctcgagctcagatcaagaggaaatcgattatgatgataccatatcagttgaaatgaagaaggaagattttgacatttatgatgaggatgaaaatcagagcccccgcagctttcaaaagaaaacacgacactattttattgctgcagtggagaggctctgggattatgggatgagtagctccccacatgttctaagaaacagggctcagagtggcagtgtccctcagttcaagaaagttgttttccaggaatttactgatggctcctttactcagcccttataccgtggagaactaaatgaacatttgggactcctggggccatatataagagcagaagttgaagataatatcatggtaactttcagaaatcaggcctctcgtccctattccttctattctagccttatttcttatgaggaagatcagaggcaaggagcagaacctagaaaaaactttgtcaagcctaatgaaaccaaaacttacttttggaaagtgcaacatcatatggcacccactaaagatgagtttgactgcaaagcctgggcttatttctctgatgttgacctggaaaaagatgtgcactcaggcctgattggaccccttctggtctgccacactaacacactgaaccctgctcatgggagacaagtgacagtacaggaatttgctctgtttttcaccatctttgatgagaccaaaagctggtacttcactgaaaatatggaaagaaactgcagggctccctgcaatatccagatggaagatcccacttttaaagagaattatcgcttccatgcaatcaatggctacataatggatacactacctggcttagtaatggctcaggatcaaaggattcgatggtatctgctcagcatgggcagcaatgaaaacatccattctattcatttcagtggacatgtgttcactgtacgaaaaaaagaggagtataaaatggcactgtacaatctctatccaggtgtttttgagacagtggaaatgttaccatccaaagctggaatttggcgggtggaatgccttattggcgagcatctacatgctgggatgagcacactttttctggtgtacagcaataagtgtcagactcccctgggaatggcttctggacacattagagattttcagattacagcttcaggacaatatggacagtgggccccaaagctggccagacttcattattccggatcaatcaatgcctggagcaccaaggagcccttttcttggatcaaggtggatctgttggcaccaatgattattcacggcatcaagacccagggtgcccgtcagaagttctccagcctctacatctctcagtttatcatcatgtatagtcttgatgggaagaagtggcagacttatcgaggaaattccactggaaccttaatggtcttctttggcaatgtggattcatctgggataaaacacaatatttttaaccctccaattattgctcgatacatccgtttgcacccaactcattatagcattcgcagcactcttcgcatggagttgatgggctgtgatttaaatagttgcagcatgccattgggaatggagagtaaagcaatatcagatgcacagattactgcttcatcctactttaccaatatgtttgccacctggtctccttcaaaagctcgacttcacctccaagggaggagtaatgcctggagacctcaggtgaataatccaaaagagtggctgcaagtggacttccagaagacaatgaaagtcacaggagtaactactcagggagtaaaatctctgcttaccagcatgtatgtgaaggagttcctcatctccagcagtcaagatggccatcagtggactctcttttttcagaatggcaaagtaaaggtttttcagggaaatcaagactccttcacacctgtggtgaactctctagacccaccgttactgactcgctaccttcgaattcacccccagagttgggtgcaccagattgccctgaggatggaggttctgggctgcgaggcacaggacctctacggcgcgccaggtacctcagagtctgctacccccgagtcagggccaggatcagagccagccacctccgggtctgagacacccgggacttccgagagtgccacccctgagtccggacccgggtccgagcccgccacttccggctccgaaactcccggcacaagcgagagcgctaccccagagtcaggaccaggaacatctacagagccctctgaaggctccgctccagggtccccagccggcagtcccactagcaccgaggagggaacctctgaaagcgccacacccgaatcagggccagggtctgagcctgctaccagcggcagcgagacaccaggcacctctgagtccgccacaccagagtccggacccggatctcccgctgggagccccacctccactgaggagggatctcctgctggctctccaacatctactgaggaaggtacctcaaccgagccatccgagggatcagctcccggcacctcagagtcggcaaccccggagtctggacccggaacttccgaaagtgccacaccagagtccggtcccgggacttcagaatcagcaacacccgagtccggccctgggtctgaacccgccacaagtggtagtgagacaccaggatcagaacctgctacctcagggtcagagacacccggatctccggcaggctcaccaacctccactgaggagggcaccagcacagaaccaagcgagggctccgcacccggaacaagcactgaacccagtgagggttcagcacccggctctgagccggccacaagtggcagtgagacacccggcacttcagagagtgccacccccgagagtggcccaggcactagtaccgagccctctgaaggcagtgcgccagcctcgagcgaacaaaaactcatctcagaagaggatctgtcacctgcaaccggtcatcatcaccatcaccattga

SEQ ID NO: 1151 - protein, 2206 aa, synthetic construct
  REGION 1..2206: note = Description of Artificial Sequence: Synthetic polypeptide
ATRRYYLGAVELSWDYMQGAPGSSPSASTGTGPGSSPSASTGTGPGASPGTSSTGSPGASPGTSSTGSPGSSTPSGATGSPGSSPSASTGTGPGASPGTSSTGSPGSSPSASTGTGPGTPGSGTASSSPGSSTPSGATGSPGSSTPSGATGSPGASPGTSSTGSPASSSDLGELPVDARFPPRVPKSFPFNTSVVYKKTLFVEFTDHLFNIAKPRPPWMGLLGPTIQAEVYDTVVITLKNMASHPVSLHAVGVSYWKASEGAEYDDQTSQREKEDDKVFPGGSHTYVWQVLKENGPMASDPLCLTYSYLSHVDLVKDLNSGLIGALLVCREGSLAKEKTQTLHKFILLFAVFDEGKSWHSETKNSLMQDRDAASARAWPKMHTVNGYVNRSLPGLIGCHRKSVYWHVIGMGTTPEVHSIFLEGHTFLVRNHRQASLEISPITFLTAQTLLMDLGQFLLFCHISSHQHDGMEAYVKVDSCPEEPQLRMKNNEEAEDYDDDLTDSEMDVVRFDDDNSPSFIQIRSVAKKHPKTWVHYIAAEEEDWDYAPLVLAPDGAPTSTEPSEGSAPGSPAGSPTSTEEGTSTEPSEGSAPGTSTEPSEGSAPGTSESATPESGPGTSTEPSEGSAPGTSESATPESGPGSEPATSGSETPGTSTEPSEGSAPGTSTEPSEGSAPGTSESATPESGPGTSESATPESGPGASSDRSYKSQYLNNGPQRIGRKYKKVRFMAYTDETFKTREAIQHESGILGPLLYGEVGDTLLIIFKNQASRPYNIYPHGITDVRPLYSRRLPKGVKHLKDFPILPGEIFKYKWTVTVEDGPTKSDPRCLTRYYSSFVNMERDLASGLIGPLLICYKESVDQRGNQIMSDKRNVILFSVFDENRSWYLTENIQRFLPNPAGVQLEDPEFQASNIMHSINGYVFDSLQLSVCLHEVAYWYILSIGAQTDFLSVFFSGYTFKHKMVYEDTLTLFPFSGETVFMSMENPGLWILGCHNSDFRNRGMTALLKVSSCDKNTGDYYEDSYEDISAYLLSKNNAIEPRSFSQNPPVLKRHQREITRTTLQSDQEEIDYDDTISVEMKKEDFDIYDEDENQSPRSFQKKTRHYFIAAVERLWDYGMSSSPHVLRNRAQGAPGTPGSGTASSSPGASPGTSSTGSPGASPGTSSTGSPGASPGTSSTGSPGSSPSASTGTGPGTPGSGTASSSPGASPGTSSTGSPGASPGTSSTGSPGASPGTSSTGSPGSSTPSGATGSPGSSTPSGATGSPGASPGTSSTGSPASSRAQSGSVPQFKKVVFQEFTDGSFTQPLYRGELNEHLGLLGPYIRAEVEDNIMVTFRNQASRPYSFYSSLISYEEDQRQGAEPRKNFVKPNETKTYFWKVQHHMAPTKDEFDCKAWAYFSDVDLEKDVHSGLIGPLLVCHTNTLNPAHGRQVTVQEFALFFTIFDETKSWYFTENMERNCRAPCNIQMEDPTFKENYRFHAINGYIMDTLPGLVMAQDQRIRWYLLSMGSNENIHSIHFSGHVFTVRKKEEYKMALYNLYPGVFETVEMLPSKAGIWRVECLIGEHLHAGMSTLFLVYSNKCQTPLGMASGHIRDFQITASGQYGQWAPKLARLHYSGSINAWSTKEPFSWIKVDLLAPMIIHGIKTQGARQKFSSLYISQFIIMYSLDGKKWQTYRGNSTGTLMVFFGNVDSSGIKHNIFNPPIIARYIRLHPTHYSIRSTLRMELMGCDLNSCSMPLGMESKAISDAQITASSYFTNMFATWSPSKARLHLQGRSNAWRPQVNNPKEWLQVDFQKTMKVTGVTTQGVKSLLTSMYVKEFLISSSQDGHQWTLFFQNGKVKVFQGNQDSFTPVVNSLDPPLLTRYLRIHPQSWVHQIALRMEVLGCEAQDLYGAPGTSESATPESGPGSEPATSGSETPGTSESATPESGPGSEPATSGSETPGTSESATPESGPGTSTEPSEGSAPGSPAGSPTSTEEGTSESATPESGPGSEPATSGSETPGTSESATPESGPGSPAGSPTSTEEGSPAGSPTSTEEGTSTEPSEGSAPGTSESATPESGPGTSESATPESGPGTSESATPESGPGSEPATSGSETPGSEPATSGSETPGSPAGSPTSTEEGTSTEPSEGSAPGTSTEPSEGSAPGSEPATSGSETPGTSESATPESGPGTSTEPSEGSAPASSEQKLISEEDLSPATGHHHHHH

SEQ ID NO: 1152 - DNA, 6621 bp, synthetic construct
  misc_feature 1..6621: note = Description of Artificial Sequence: Synthetic polynucleotide
  source 1..6621: mol_type = other DNA
gccaccagaagatactacctgggtgcagtggaactgtcatgggactatatgcaaggcgcgccaggctccagcccctccgcgagcacgggaaccggaccaggttcgtcaccctcagcatcaacggggacgggaccgggggcgtcaccaggaacgtcctccaccggctcgccgggtgcatcacccggaacgtcatcgaccggatcgccagggagctcgacgccatcaggcgcaacaggatcacctggctcaagccctagcgcgtcaaccggcacgggtccgggtgcctcccctggcacgtccagcaccggatcacccggatcgagcccatccgcctcaaccggaaccggacccggtacaccagggtcgggaacagcctcctcgtcaccaggctcctcaaccccctcgggagccacgggttcgcccggttcgtcaacgccttccggagcaactggtagccccggagcatcgccaggaacttcgagcacggggtcgcccgcctcgagcagtgatctcggtgagctgcctgtggacgcaagatttcctcctagagtgccaaaatcttttccattcaacacctcagtcgtgtacaaaaagactctgtttgtagaattcacggatcaccttttcaacatcgctaagccaaggccaccctggatgggtctgctaggtcctaccatccaggctgaggtttatgatacagtggtcattacacttaagaacatggcttcccatcctgtcagtcttcatgctgttggtgtatcctactggaaagcttctgagggagctgaatatgatgatcagaccagtcaaagggagaaagaagatgataaagtcttccctggtggaagccatacatatgtctggcaggtcctgaaagagaatggtccaatggcctctgacccactgtgccttacctactcatatctttctcatgtggacctggtaaaagacttgaattcaggcctcattggagccctactagtatgtagagaagggagtctggccaaggaaaagacacagaccttgcacaaatttatactactttttgctgtatttgatgaagggaaaagttggcactcagaaacaaagaactccttgatgcaggatagggatgctgcatctgctcgggcctggcctaaaatgcacacagtcaatggttatgtaaacaggtctctgccaggtctgattggatgccacaggaaatcagtctattggcatgtgattggaatgggcaccactcctgaagtgcactcaatattcctcgaaggtcacacatttcttgtgaggaaccatcgccaggctagcttggaaatctcgccaataactttccttactgctcaaacactcttgatggaccttggacagtttctactgttttgtcatatctcttcccaccaacatgatggcatggaagcttatgtcaaagtagacagctgtccagaggaaccccaactacgaatgaaaaataatgaagaagcggaagactatgatgatgatcttactgattctgaaatggatgtggtcaggtttgatgatgacaactctccttcctttatccaaattcgctcagttgccaagaagcatcctaaaacttgggtacattacattgctgctgaagaggaggactgggactatgctcccttagtcctcgcccccgatggcgcgccaaccagtacggagccgtccgaggggagcgcaccaggaagcccggctgggagcccgacttctaccgaagagggtacatctaccgaaccaagtgaaggttcagcaccaggcacctcaacagaaccctctgagggctcggcgcctggtacaagtgagtccgccaccccagaatccgggcctgggacaagcacagaaccttcggaagggagtgcccctggaacatccgaatcggcaaccccagaatcagggccaggatctgagcccgcgacttcgggctccgagacgcctgggacatccaccgagccctccgaaggatcagccccaggcaccagcacggagccctctgagggaagcgcacctggtaccagcgaaagcgcaactcccgaatcaggtcccggtacgagcgagtcggcgaccccggagagcgggccaggtgcctcgagcgacagaagttataaaagtcaatatttgaacaatggccctcagcggattggtaggaagtacaaaaaagtccgatttatggcatacacagatgaaacctttaagactcgtgaagctattcagcatgaatcaggaatcttgggacctttactttatggggaagttggagacacactgttgattatatttaagaatcaagcaagcagaccatataacatctaccctcacggaatcactgatgtccgtcctttgtattcaaggagattaccaaaaggtgtaaaacatttgaaggattttccaattctgccaggagaaatattcaaatataaatggacagtgactgtagaagatgggccaactaaatcagatcctcggtgcctgacccgctattactctagtttcgttaatatggagagagatctagcttcaggactcattggccctctcctcatctgctacaaagaatctgtagatcaaagaggaaaccagataatgtcagacaagaggaatgtcatcctgttttctgtatttgatgagaaccgaagctggtacctcacagagaatatacaacgctttctccccaatccagctggagtgcagcttgaggatccagagttccaagcctccaacatcatgcacagcatcaatggctatgtttttgatagtttgcagttgtcagtttgtttgcatgaggtggcatactggtacattctaagcattggagcacagactgacttcctttctgtcttcttctctggatataccttcaaacacaaaatggtctatgaagacacactcaccctattcccattctcaggagaaactgtcttcatgtcgatggaaaacccaggtctatggattctggggtgccacaactcagactttcggaacagaggcatgaccgccttactgaaggtttctagttgtgacaagaacactggtgattattacgaggacagttatgaagatatttcagcatacttgctgagtaaaaacaatgccattgaaccaagaagcttctctcaaaacccaccagtcttgaaacgccatcaacgggaaataactcgtactactcttcagtcagatcaagaggaaatcgattatgatgataccatatcagttgaaatgaagaaggaagattttgacatttatgatgaggatgaaaatcagagcccccgcagctttcaaaagaaaacacgacactattttattgctgcagtggagaggctctgggattatgggatgagtagctccccacatgttctaagaaacagggctcagggcgcgccaggtacacccggatcgggtacagcgtcatcgagccccggtgcgtcacctggtacgtcgagcacggggtcgccaggggcgtcccctgggacgtcctcaacaggctcgcccggtgcgtcacccggcacgtcgtccacgggttcacctggtagctccccttccgcgtccactggcaccgggcctggaactccggggagcggcacagcgagctcgtcgccgggagcatcgcctgggacatcgagcaccgggtcgccaggagcatcgcccggaacatccagcacaggaagccccggcgcgtcgcccgggacatcaagcacaggttccccgggatcgagcacgccgtccggagccactggatcaccagggagctcgacaccttccggcgcaacgggatcgcccggagccagcccgggtacgtcaagcactggctcccctgcctcgagcagggctcagagtggcagtgtccctcagttcaagaaagttgttttccaggaatttactgatggctcctttactcagcccttataccgtggagaactaaatgaacatttgggactcctggggccatatataagagcagaagttgaagataatatcatggtaactttcagaaatcaggcctctcgtccctattccttctattctagccttatttcttatgaggaagatcagaggcaaggagcagaacctagaaaaaactttgtcaagcctaatgaaaccaaaacttacttttggaaagtgcaacatcatatggcacccactaaagatgagtttgactgcaaagcctgggcttatttctctgatgttgacctggaaaaagatgtgcactcaggcctgattggaccccttctggtctgccacactaacacactgaaccctgctcatgggagacaagtgacagtacaggaatttgctctgtttttcaccatctttgatgagaccaaaagctggtacttcactgaaaatatggaaagaaactgcagggctccctgcaatatccagatggaagatcccacttttaaagagaattatcgcttccatgcaatcaatggctacataatggatacactacctggcttagtaatggctcaggatcaaaggattcgatggtatctgctcagcatgggcagcaatgaaaacatccattctattcatttcagtggacatgtgttcactgtacgaaaaaaagaggagtataaaatggcactgtacaatctctatccaggtgtttttgagacagtggaaatgttaccatccaaagctggaatttggcgggtggaatgccttattggcgagcatctacatgctgggatgagcacactttttctggtgtacagcaataagtgtcagactcccctgggaatggcttctggacacattagagattttcagattacagcttcaggacaatatggacagtgggccccaaagctggccagacttcattattccggatcaatcaatgcctggagcaccaaggagcccttttcttggatcaaggtggatctgttggcaccaatgattattcacggcatcaagacccagggtgcccgtcagaagttctccagcctctacatctctcagtttatcatcatgtatagtcttgatgggaagaagtggcagacttatcgaggaaattccactggaaccttaatggtcttctttggcaatgtggattcatctgggataaaacacaatatttttaaccctccaattattgctcgatacatccgtttgcacccaactcattatagcattcgcagcactcttcgcatggagttgatgggctgtgatttaaatagttgcagcatgccattgggaatggagagtaaagcaatatcagatgcacagattactgcttcatcctactttaccaatatgtttgccacctggtctccttcaaaagctcgacttcacctccaagggaggagtaatgcctggagacctcaggtgaataatccaaaagagtggctgcaagtggacttccagaagacaatgaaagtcacaggagtaactactcagggagtaaaatctctgcttaccagcatgtatgtgaaggagttcctcatctccagcagtcaagatggccatcagtggactctcttttttcagaatggcaaagtaaaggtttttcagggaaatcaagactccttcacacctgtggtgaactctctagacccaccgttactgactcgctaccttcgaattcacccccagagttgggtgcaccagattgccctgaggatggaggttctgggctgcgaggcacaggacctctacggcgcgccaggtacctcagagtctgctacccccgagtcagggccaggatcagagccagccacctccgggtctgagacacccgggacttccgagagtgccacccctgagtccggacccgggtccgagcccgccacttccggctccgaaactcccggcacaagcgagagcgctaccccagagtcaggaccaggaacatctacagagccctctgaaggctccgctccagggtccccagccggcagtcccactagcaccgaggagggaacctctgaaagcgccacacccgaatcagggccagggtctgagcctgctaccagcggcagcgagacaccaggcacctctgagtccgccacaccagagtccggacccggatctcccgctgggagccccacctccactgaggagggatctcctgctggctctccaacatctactgaggaaggtacctcaaccgagccatccgagggatcagctcccggcacctcagagtcggcaaccccggagtctggacccggaacttccgaaagtgccacaccagagtccggtcccgggacttcagaatcagcaacacccgagtccggccctgggtctgaacccgccacaagtggtagtgagacaccaggatcagaacctgctacctcagggtcagagacacccggatctccggcaggctcaccaacctccactgaggagggcaccagcacagaaccaagcgagggctccgcacccggaacaagcactgaacccagtgagggttcagcacccggctctgagccggccacaagtggcagtgagacacccggcacttcagagagtgccacccccgagagtggcccaggcactagtaccgagccctctgaaggcagtgcgccagcctcgagcgaacaaaaactcatctcagaagaggatctgtcacctgcaaccggtcatcatcaccatcaccattga

SEQ ID NO: 1153 - protein, 2203 aa, synthetic construct
  REGION 1..2203: note = Description of Artificial Sequence: Synthetic polypeptide
ATRRYYLGAVELSWDYMQGAPGSSPSASTGTGPGSSPSASTGTGPGASPGTSSTGSPGASPGTSSTGSPGSSTPSGATGSPGSSPSASTGTGPGASPGTSSTGSPGSSPSASTGTGPGTPGSGTASSSPGSSTPSGATGSPGSSTPSGATGSPGASPGTSSTGSPASSSDLGELPVDARFPPRVPKSFPFNTSVVYKKTLFVEFTDHLFNIAKPRPPWMGLLGPTIQAEVYDTVVITLKNMASHPVSLHAVGVSYWKASEGAEYDDQTSQREKEDDKVFPGGSHTYVWQVLKENGPMASDPLCLTYSYLSHVDLVKDLNSGLIGALLVCREGSLAKEKTQTLHKFILLFAVFDEGKSWHSETKNSLMQDRDAASARAWPKMHTVNGYVNRSLPGLIGCHRKSVYWHVIGMGTTPEVHSIFLEGHTFLVRNHRQASLEISPITFLTAQTLLMDLGQFLLFCHISSHQHDGMEAYVKVDSCPEEPQLRMKNNEEAEDYDDDLTDSEMDVVRFDDDNSPSFIQIRSVAKKHPKTWVHYIAAEEEDWDYAPLVLAPDGAPTSTEPSEGSAPGSPAGSPTSTEEGTSTEPSEGSAPGTSTEPSEGSAPGTSESATPESGPGTSTEPSEGSAPGTSESATPESGPGSEPATSGSETPGTSTEPSEGSAPGTSTEPSEGSAPGTSESATPESGPGTSESATPESGPGASSDRSYKSQYLNNGPQRIGRKYKKVRFMAYTDETFKTREAIQHESGILGPLLYGEVGDTLLIIFKNQASRPYNIYPHGITDVRPLYSRRLPKGVKHLKDFPILPGEIFKYKWTVTVEDGPTKSDPRCLTRYYSSFVNMERDLASGLIGPLLICYKESVDQRGNQIMSDKRNVILFSVFDENRSWYLTENIQRFLPNPAGVQLEDPEFQASNIMHSINGYVFDSLQLSVCLHEVAYWYILSIGAQTDFLSVFFSGYTFKHKMVYEDTLTLFPFSGETVFMSMENPGLWILGCHNSDFRNRGMTALLKVSSCDKNTGDYYEDSYEDISAYLLSKNNAIEPRSFSQNPPVLKRHQREITRTTLQSDQEEIDYDDTISVEMKKEDFDIYDEDENQSPRSFQKKTRHYFIAAVERLWDYGMSSSPHVLRNRAQSGSVPQFKKVVFQEFTDGSFTQPLYRGELNEHLGLLGPYIRAEVEDNIMVTFRNQASRPYSFYSSLISYEEDQRQGAEPRKNFVKPNETKTYFWKVQHHMAPTKDEFDCKAWAYFSDVDLEKDVHSGLIGPLLVCHTNTLNPAHGRQVTVQEFALFFTIFDETKSWYFTENMERNCRGAPTSESATPESGPGSEPATSGSETPGTSESATPESGPGSEPATSGSETPGTSESATPESGPGTSTEPSEGSAPGTSESATPESGPGSPAGSPTSTEEGSPAGSPTSTEEGSPAGSPTSTEEGTSESATPESGPGTSTEPSEGSAPGASSAPCNIQMEDPTFKENYRFHAINGYIMDTLPGLVMAQDQRIRWYLLSMGSNENIHSIHFSGHVFTVRKKEEYKMALYNLYPGVFETVEMLPSKAGIWRVECLIGEHLHAGMSTLFLVYSNKCQTPLGMASGHIRDFQITASGQYGQWAPKLARLHYSGSINAWSTKEPFSWIKVDLLAPMIIHGIKTQGARQKFSSLYISQFIIMYSLDGKKWQTYRGNSTGTLMVFFGNVDSSGIKHNIFNPPIIARYIRLHPTHYSIRSTLRMELMGCDLNSCSMPLGMESKAISDAQITASSYFTNMFATWSPSKARLHLQGRSNAWRPQVNNPKEWLQVDFQKTMKVTGVTTQGVKSLLTSMYVKEFLISSSQDGHQWTLFFQNGKVKVFQGNQDSFTPVVNSLDPPLLTRYLRIHPQSWVHQIALRMEVLGCEAQDLYGAPGTSESATPESGPGSEPATSGSETPGTSESATPESGPGSEPATSGSETPGTSESATPESGPGTSTEPSEGSAPGSPAGSPTSTEEGTSESATPESGPGSEPATSGSETPGTSESATPESGPGSPAGSPTSTEEGSPAGSPTSTEEGTSTEPSEGSAPGTSESATPESGPGTSESATPESGPGTSESATPESGPGSEPATSGSETPGSEPATSGSETPGSPAGSPTSTEEGTSTEPSEGSAPGTSTEPSEGSAPGSEPATSGSETPGTSESATPESGPGTSTEPSEGSAPASSEQKLISEEDLSPATGHHHHHH

SEQ ID NO: 1154 - DNA, 6612 bp, synthetic construct
  misc_feature 1..6612: note = Description of Artificial Sequence: Synthetic polynucleotide
  source 1..6612: mol_type = other DNA
gccaccagaagatactacctgggtgcagtggaactgtcatgggactatatgcaaggcgcgccaggctccagcccctccgcgagcacgggaaccggaccaggttcgtcaccctcagcatcaacggggacgggaccgggggcgtcaccaggaacgtcctccaccggctcgccgggtgcatcacccggaacgtcatcgaccggatcgccagggagctcgacgccatcaggcgcaacaggatcacctggctcaagccctagcgcgtcaaccggcacgggtccgggtgcctcccctggcacgtccagcaccggatcacccggatcgagcccatccgcctcaaccggaaccggacccggtacaccagggtcgggaacagcctcctcgtcaccaggctcctcaaccccctcgggagccacgggttcgcccggttcgtcaacgccttccggagcaactggtagccccggagcatcgccaggaacttcgagcacggggtcgcccgcctcgagcagtgatctcggtgagctgcctgtggacgcaagatttcctcctagagtgccaaaatcttttccattcaacacctcagtcgtgtacaaaaagactctgtttgtagaattcacggatcaccttttcaacatcgctaagccaaggccaccctggatgggtctgctaggtcctaccatccaggctgaggtttatgatacagtggtcattacacttaagaacatggcttcccatcctgtcagtcttcatgctgttggtgtatcctactggaaagcttctgagggagctgaatatgatgatcagaccagtcaaagggagaaagaagatgataaagtcttccctggtggaagccatacatatgtctggcaggtcctgaaagagaatggtccaatggcctctgacccactgtgccttacctactcatatctttctcatgtggacctggtaaaagacttgaattcaggcctcattggagccctactagtatgtagagaagggagtctggccaaggaaaagacacagaccttgcacaaatttatactactttttgctgtatttgatgaagggaaaagttggcactcagaaacaaagaactccttgatgcaggatagggatgctgcatctgctcgggcctggcctaaaatgcacacagtcaatggttatgtaaacaggtctctgccaggtctgattggatgccacaggaaatcagtctattggcatgtgattggaatgggcaccactcctgaagtgcactcaatattcctcgaaggtcacacatttcttgtgaggaaccatcgccaggctagcttggaaatctcgccaataactttccttactgctcaaacactcttgatggaccttggacagtttctactgttttgtcatatctcttcccaccaacatgatggcatggaagcttatgtcaaagtagacagctgtccagaggaaccccaactacgaatgaaaaataatgaagaagcggaagactatgatgatgatcttactgattctgaaatggatgtggtcaggtttgatgatgacaactctccttcctttatccaaattcgctcagttgccaagaagcatcctaaaacttgggtacattacattgctgctgaagaggaggactgggactatgctcccttagtcctcgcccccgatggcgcgccaaccagtacggagccgtccgaggggagcgcaccaggaagcccggctgggagcccgacttctaccgaagagggtacatctaccgaaccaagtgaaggttcagcaccaggcacctcaacagaaccctctgagggctcggcgcctggtacaagtgagtccgccaccccagaatccgggcctgggacaagcacagaaccttcggaagggagtgcccctggaacatccgaatcggcaaccccagaatcagggccaggatctgagcccgcgacttcgggctccgagacgcctgggacatccaccgagccctccgaaggatcagccccaggcaccagcacggagccctctgagggaagcgcacctggtaccagcgaaagcgcaactcccgaatcaggtcccggtacgagcgagtcggcgaccccggagagcgggccaggtgcctcgagcgacagaagttataaaagtcaatatttgaacaatggccctcagcggattggtaggaagtacaaaaaagtccgatttatggcatacacagatgaaacctttaagactcgtgaagctattcagcatgaatcaggaatcttgggacctttactttatggggaagttggagacacactgttgattatatttaagaatcaagcaagcagaccatataacatctaccctcacggaatcactgatgtccgtcctttgtattcaaggagattaccaaaaggtgtaaaacatttgaaggattttccaattctgccaggagaaatattcaaatataaatggacagtgactgtagaagatgggccaactaaatcagatcctcggtgcctgacccgctattactctagtttcgttaatatggagagagatctagcttcaggactcattggccctctcctcatctgctacaaagaatctgtagatcaaagaggaaaccagataatgtcagacaagaggaatgtcatcctgttttctgtatttgatgagaaccgaagctggtacctcacagagaatatacaacgctttctccccaatccagctggagtgcagcttgaggatccagagttccaagcctccaacatcatgcacagcatcaatggctatgtttttgatagtttgcagttgtcagtttgtttgcatgaggtggcatactggtacattctaagcattggagcacagactgacttcctttctgtcttcttctctggatataccttcaaacacaaaatggtctatgaagacacactcaccctattcccattctcaggagaaactgtcttcatgtcgatggaaaacccaggtctatggattctggggtgccacaactcagactttcggaacagaggcatgaccgccttactgaaggtttctagttgtgacaagaacactggtgattattacgaggacagttatgaagatatttcagcatacttgctgagtaaaaacaatgccattgaaccaagaagcttctctcaaaacccaccagtcttgaaacgccatcaacgggaaataactcgtactactcttcagtcagatcaagaggaaatcgattatgatgataccatatcagttgaaatgaagaaggaagattttgacatttatgatgaggatgaaaatcagagcccccgcagctttcaaaagaaaacacgacactattttattgctgcagtggagaggctctgggattatgggatgagtagctccccacatgttctaagaaacagggctcagagtggcagtgtccctcagttcaagaaagttgttttccaggaatttactgatggctcctttactcagcccttataccgtggagaactaaatgaacatttgggactcctggggccatatataagagcagaagttgaagataatatcatggtaactttcagaaatcaggcctctcgtccctattccttctattctagccttatttcttatgaggaagatcagaggcaaggagcagaacctagaaaaaactttgtcaagcctaatgaaaccaaaacttacttttggaaagtgcaacatcatatggcacccactaaagatgagtttgactgcaaagcctgggcttatttctctgatgttgacctggaaaaagatgtgcactcaggcctgattggaccccttctggtctgccacactaacacactgaaccctgctcatgggagacaagtgacagtacaggaatttgctctgtttttcaccatctttgatgagaccaaaagctggtacttcactgaaaatatggaaagaaactgcaggggcgcgccaacgtccgaaagtgctacccctgagtcaggccctggtagtgagcctgccacaagcggaagcgaaactccggggacctcagagtctgccactcccgaatcggggccaggctctgaaccggccacttcagggagcgaaacaccaggaacatcggagagcgctaccccggagagcgggccaggaactagtactgagcctagcgagggaagtgcacctggtacaagcgagtccgccacacccgagtctggccctggctctccagcgggctcacccacgagcactgaagagggctctcccgctggcagcccaacgtcgacagaagaaggatcaccagcaggctcccccacatcaacagaggagggtacatcagaatctgctactcccgagagtggacccggtacctccactgagcccagcgaggggagtgcaccaggtgcctcgagcgctccctgcaatatccagatggaagatcccacttttaaagagaattatcgcttccatgcaatcaatggctacataatggatacactacctggcttagtaatggctcaggatcaaaggattcgatggtatctgctcagcatgggcagcaatgaaaacatccattctattcatttcagtggacatgtgttcactgtacgaaaaaaagaggagtataaaatggcactgtacaatctctatccaggtgtttttgagacagtggaaatgttaccatccaaagctggaatttggcgggtggaatgccttattggcgagcatctacatgctgggatgagcacactttttctggtgtacagcaataagtgtcagactcccctgggaatggcttctggacacattagagattttcagattacagcttcaggacaatatggacagtgggccccaaagctggccagacttcattattccggatcaatcaatgcctggagcaccaaggagcccttttcttggatcaaggtggatctgttggcaccaatgattattcacggcatcaagacccagggtgcccgtcagaagttctccagcctctacatctctcagtttatcatcatgtatagtcttgatgggaagaagtggcagacttatcgaggaaattccactggaaccttaatggtcttctttggcaatgtggattcatctgggataaaacacaatatttttaaccctccaattattgctcgatacatccgtttgcacccaactcattatagcattcgcagcactcttcgcatggagttgatgggctgtgatttaaatagttgcagcatgccattgggaatggagagtaaagcaatatcagatgcacagattactgcttcatcctactttaccaatatgtttgccacctggtctccttcaaaagctcgacttcacctccaagggaggagtaatgcctggagacctcaggtgaataatccaaaagagtggctgcaagtggacttccagaagacaatgaaagtcacaggagtaactactcagggagtaaaatctctgcttaccagcatgtatgtgaaggagttcctcatctccagcagtcaagatggccatcagtggactctcttttttcagaatggcaaagtaaaggtttttcagggaaatcaagactccttcacacctgtggtgaactctctagacccaccgttactgactcgctaccttcgaattcacccccagagttgggtgcaccagattgccctgaggatggaggttctgggctgcgaggcacaggacctctacggcgcgccaggtacctcagagtctgctacccccgagtcagggccaggatcagagccagccacctccgggtctgagacacccgggacttccgagagtgccacccctgagtccggacccgggtccgagcccgccacttccggctccgaaactcccggcacaagcgagagcgctaccccagagtcaggaccaggaacatctacagagccctctgaaggctccgctccagggtccccagccggcagtcccactagcaccgaggagggaacctctgaaagcgccacacccgaatcagggccagggtctgagcctgctaccagcggcagcgagacaccaggcacctctgagtccgccacaccagagtccggacccggatctcccgctgggagccccacctccactgaggagggatctcctgctggctctccaacatctactgaggaaggtacctcaaccgagccatccgagggatcagctcccggcacctcagagtcggcaaccccggagtctggacccggaacttccgaaagtgccacaccagagtccggtcccgggacttcagaatcagcaacacccgagtccggccctgggtctgaacccgccacaagtggtagtgagacaccaggatcagaacctgctacctcagggtcagagacacccggatctccggcaggctcaccaacctccactgaggagggcaccagcacagaaccaagcgagggctccgcacccggaacaagcactgaacccagtgagggttcagcacccggctctgagccggccacaagtggcagtgagacacccggcacttcagagagtgccacccccgagagtggcccaggcactagtaccgagccctctgaaggcagtgcgccagcctcgagcgaacaaaaactcatctcagaagaggatctgtcacctgcaaccggtcatcatcaccatcaccattga

SEQ ID NO: 1155 - protein, 2206 aa, synthetic construct
  REGION 1..2206: note = Description of Artificial Sequence: Synthetic polypeptide
ATRRYYLGAVELSWDYMQGAPGSSPSASTGTGPGSSPSASTGTGPGASPGTSSTGSPGASPGTSSTGSPGSSTPSGATGSPGSSPSASTGTGPGASPGTSSTGSPGSSPSASTGTGPGTPGSGTASSSPGSSTPSGATGSPGSSTPSGATGSPGASPGTSSTGSPASSSDLGELPVDARFPPRVPKSFPFNTSVVYKKTLFVEFTDHLFNIAKPRPPWMGLLGPTIQAEVYDTVVITLKNMASHPVSLHAVGVSYWKASEGAEYDDQTSQREKEDDKVFPGGSHTYVWQVLKENGPMASDPLCLTYSYLSHVDLVKDLNSGLIGALLVCREGSLAKEKTQTLHKFILLFAVFDEGKSWHSETKNSLMQDRDAASARAWPKMHTVNGYVNRSLPGLIGCHRKSVYWHVIGMGTTPEVHSIFLEGHTFLVRNHRQASLEISPITFLTAQTLLMDLGQFLLFCHISSHQHDGMEAYVKVDSCPEEPQLRMKNNEEAEDYDDDLTDSEMDVVRFDDDNSPSFIQIRSVAKKHPKTWVHYIAAEEEDWDYAPLVLAPDDRSYKSQYLNNGPQRIGRKYKKVRFMAYTDETFKTREAIQHESGILGPLLYGEVGDTLLIIFKNQASRPYNIYPHGITDVRPLYSRRLPKGVKHLKDFPILPGEIFKYKWTVTVEDGPTKSDPRCLTRYYSSFVNMERDLASGLIGPLLICYKESVDQRGNQIMSDKRNVILFSVFDENRSWYLTENIQRFLPNPAGVQLEDPEFQASNIMHSINGYVFDSLQLSVCLHEVAYWYILSIGAQTDFLSVFFSGYTFKHKMVYEDTLTLFPFSGETVFMSMENPGLWILGCHNSDFRNRGMTALLKVSSCDKNTGDYYEDSYEDISAYLLSKNNAIEPRSFSQNPPVLKRHQREITRTTLQGAPGTPGSGTASSSPGASPGTSSTGSPGASPGTSSTGSPGASPGTSSTGSPGSSPSASTGTGPGTPGSGTASSSPGASPGTSSTGSPGASPGTSSTGSPGASPGTSSTGSPGSSTPSGATGSPGSSTPSGATGSPGASPGTSSTGSPASSSDQEEIDYDDTISVEMKKEDFDIYDEDENQSPRSFQKKTRHYFIAAVERLWDYGMSSSPHVLRNRAQGAPGTPGSGTASSSPGASPGTSSTGSPGASPGTSSTGSPGASPGTSSTGSPGSSPSASTGTGPGTPGSGTASSSPGASPGTSSTGSPGASPGTSSTGSPGASPGTSSTGSPGSSTPSGATGSPGSSTPSGATGSPGASPGTSSTGSPASSRAQSGSVPQFKKVVFQEFTDGSFTQPLYRGELNEHLGLLGPYIRAEVEDNIMVTFRNQASRPYSFYSSLISYEEDQRQGAEPRKNFVKPNETKTYFWKVQHHMAPTKDEFDCKAWAYFSDVDLEKDVHSGLIGPLLVCHTNTLNPAHGRQVTVQEFALFFTIFDETKSWYFTENMERNCRAPCNIQMEDPTFKENYRFHAINGYIMDTLPGLVMAQDQRIRWYLLSMGSNENIHSIHFSGHVFTVRKKEEYKMALYNLYPGVFETVEMLPSKAGIWRVECLIGEHLHAGMSTLFLVYSNKCQTPLGMASGHIRDFQITASGQYGQWAPKLARLHYSGSINAWSTKEPFSWIKVDLLAPMIIHGIKTQGARQKFSSLYISQFIIMYSLDGKKWQTYRGNSTGTLMVFFGNVDSSGIKHNIFNPPIIARYIRLHPTHYSIRSTLRMELMGCDLNSCSMPLGMESKAISDAQITASSYFTNMFATWSPSKARLHLQGRSNAWRPQVNNPKEWLQVDFQKTMKVTGVTTQGVKSLLTSMYVKEFLISSSQDGHQWTLFFQNGKVKVFQGNQDSFTPVVNSLDPPLLTRYLRIHPQSWVHQIALRMEVLGCEAQDLYGAPGTSESATPESGPGSEPATSGSETPGTSESATPESGPGSEPATSGSETPGTSESATPESGPGTSTEPSEGSAPGSPAGSPTSTEEGTSESATPESGPGSEPATSGSETPGTSESATPESGPGSPAGSPTSTEEGSPAGSPTSTEEGTSTEPSEGSAPGTSESATPESGPGTSESATPESGPGTSESATPESGPGSEPATSGSETPGSEPATSGSETPGSPAGSPTSTEEGTSTEPSEGSAPGTSTEPSEGSAPGSEPATSGSETPGTSESATPESGPGTSTEPSEGSAPASSEQKLISEEDLSPATGHHHHHH

SEQ ID NO: 1156 - DNA, 6621 bp, synthetic construct
  misc_feature 1..6621: note = Description of Artificial Sequence: Synthetic polynucleotide
  source 1..6621: mol_type = other DNA
gccaccagaagatactacctgggtgcagtggaactgtcatgggactatatgcaaggcgcgccaggctccagcccctccgcgagcacgggaaccggaccaggttcgtcaccctcagcatcaacggggacgggaccgggggcgtcaccaggaacgtcctccaccggctcgccgggtgcatcacccggaacgtcatcgaccggatcgccagggagctcgacgccatcaggcgcaacaggatcacctggctcaagccctagcgcgtcaaccggcacgggtccgggtgcctcccctggcacgtccagcaccggatcacccggatcgagcccatccgcctcaaccggaaccggacccggtacaccagggtcgggaacagcctcctcgtcaccaggctcctcaaccccctcgggagccacgggttcgcccggttcgtcaacgccttccggagcaactggtagccccggagcatcgccaggaacttcgagcacggggtcgcccgcctcgagcagtgatctcggtgagctgcctgtggacgcaagatttcctcctagagtgccaaaatcttttccattcaacacctcagtcgtgtacaaaaagactctgtttgtagaattcacggatcaccttttcaacatcgctaagccaaggccaccctggatgggtctgctaggtcctaccatccaggctgaggtttatgatacagtggtcattacacttaagaacatggcttcccatcctgtcagtcttcatgctgttggtgtatcctactggaaagcttctgagggagctgaatatgatgatcagaccagtcaaagggagaaagaagatgataaagtcttccctggtggaagccatacatatgtctggcaggtcctgaaagagaatggtccaatggcctctgacccactgtgccttacctactcatatctttctcatgtggacctggtaaaagacttgaattcaggcctcattggagccctactagtatgtagagaagggagtctggccaaggaaaagacacagaccttgcacaaatttatactactttttgctgtatttgatgaagggaaaagttggcactcagaaacaaagaactccttgatgcaggatagggatgctgcatctgctcgggcctggcctaaaatgcacacagtcaatggttatgtaaacaggtctctgccaggtctgattggatgccacaggaaatcagtctattggcatgtgattggaatgggcaccactcctgaagtgcactcaatattcctcgaaggtcacacatttcttgtgaggaaccatcgccaggctagcttggaaatctcgccaataactttccttactgctcaaacactcttgatggaccttggacagtttctactgttttgtcatatctcttcccaccaacatgatggcatggaagcttatgtcaaagtagacagctgtccagaggaaccccaactacgaatgaaaaataatgaagaagcggaagactatgatgatgatcttactgattctgaaatggatgtggtcaggtttgatgatgacaactctccttcctttatccaaattcgctcagttgccaagaagcatcctaaaacttgggtacattacattgctgctgaagaggaggactgggactatgctcccttagtcctcgcccccgatgacagaagttataaaagtcaatatttgaacaatggccctcagcggattggtaggaagtacaaaaaagtccgatttatggcatacacagatgaaacctttaagactcgtgaagctattcagcatgaatcaggaatcttgggacctttactttatggggaagttggagacacactgttgattatatttaagaatcaagcaagcagaccatataacatctaccctcacggaatcactgatgtccgtcctttgtattcaaggagattaccaaaaggtgtaaaacatttgaaggattttccaattctgccaggagaaatattcaaatataaatggacagtgactgtagaagatgggccaactaaatcagatcctcggtgcctgacccgctattactctagtttcgttaatatggagagagatctagcttcaggactcattggccctctcctcatctgctacaaagaatctgtagatcaaagaggaaaccagataatgtcagacaagaggaatgtcatcctgttttctgtatttgatgagaaccgaagctggtacctcacagagaatatacaacgctttctccccaatccagctggagtgcagcttgaggatccagagttccaagcctccaacatcatgcacagcatcaatggctatgtttttgatagtttgcagttgtcagtttgtttgcatgaggtggcatactggtacattctaagcattggagcacagactgacttcctttctgtcttcttctctggatataccttcaaacacaaaatggtctatgaagacacactcaccctattcccattctcaggagaaactgtcttcatgtcgatggaaaacccaggtctatggattctggggtgccacaactcagactttcggaacagaggcatgaccgccttactgaaggtttctagttgtgacaagaacactggtgattattacgaggacagttatgaagatatttcagcatacttgctgagtaaaaacaatgccattgaaccaagaagcttctctcaaaacccaccagtcttgaaacgccatcaacgggaaataactcgtactactcttcagggcgcgccaggtacacccggatcgggtacagcgtcatcgagccccggtgcgtcacctggtacgtcgagcacggggtcgccaggggcgtcccctgggacgtcctcaacaggctcgcccggtgcgtcacccggcacgtcgtccacgggttcacctggtagctccccttccgcgtccactggcaccgggcctggaactccggggagcggcacagcgagctcgtcgccgggagcatcgcctgggacatcgagcaccgggtcgccaggagcatcgcccggaacatccagcacaggaagccccggcgcgtcgcccgggacatcaagcacaggttccccgggatcgagcacgccgtccggagccactggatcaccagggagctcgacaccttccggcgcaacgggatcgcccggagccagcccgggtacgtcaagcactggctcccctgcctcgagctcagatcaagaggaaatcgattatgatgataccatatcagttgaaatgaagaaggaagattttgacatttatgatgaggatgaaaatcagagcccccgcagctttcaaaagaaaacacgacactattttattgctgcagtggagaggctctgggattatgggatgagtagctccccacatgttctaagaaacagggctcagggcgcgccaggtacacccggatcgggtacagcgtcatcgagccccggtgcgtcacctggtacgtcgagcacggggtcgccaggggcgtcccctgggacgtcctcaacaggctcgcccggtgcgtcacccggcacgtcgtccacgggttcacctggtagctccccttccgcgtccactggcaccgggcctggaactccggggagcggcacagcgagctcgtcgccgggagcatcgcctgggacatcgagcaccgggtcgccaggagcatcgcccggaacatccagcacaggaagccccggcgcgtcgcccgggacatcaagcacaggttccccgggatcgagcacgccgtccggagccactggatcaccagggagctcgacaccttccggcgcaacgggatcgcccggagccagcccgggtacgtcaagcactggctcccctgcctcgagcagggctcagagtggcagtgtccctcagttcaagaaagttgttttccaggaatttactgatggctcctttactcagcccttataccgtggagaactaaatgaacatttgggactcctggggccatatataagagcagaagttgaagataatatcatggtaactttcagaaatcaggcctctcgtccctattccttctattctagccttatttcttatgaggaagatcagaggcaaggagcagaacctagaaaaaactttgtcaagcctaatgaaaccaaaacttacttttggaaagtgcaacatcatatggcacccactaaagatgagtttgactgcaaagcctgggcttatttctctgatgttgacctggaaaaagatgtgcactcaggcctgattggaccccttctggtctgccacactaacacactgaaccctgctcatgggagacaagtgacagtacaggaatttgctctgtttttcaccatctttgatgagaccaaaagctggtacttcactgaaaatatggaaagaaactgcagggctccctgcaatatccagatggaagatcccacttttaaagagaattatcgcttccatgcaatcaatggctacataatggatacactacctggcttagtaatggctcaggatcaaaggattcgatggtatctgctcagcatgggcagcaatgaaaacatccattctattcatttcagtggacatgtgttcactgtacgaaaaaaagaggagtataaaatggcactgtacaatctctatccaggtgtttttgagacagtggaaatgttaccatccaaagctggaatttggcgggtggaatgccttattggcgagcatctacatgctgggatgagcacactttttctggtgtacagcaataagtgtcagactcccctgggaatggcttctggacacattagagattttcagattacagcttcaggacaatatggacagtgggccccaaagctggccagacttcattattccggatcaatcaatgcctggagcaccaaggagcccttttcttggatcaaggtggatctgttggcaccaatgattattcacggcatcaagacccagggtgcccgtcagaagttctccagcctctacatctctcagtttatcatcatgtatagtcttgatgggaagaagtggcagacttatcgaggaaattccactggaaccttaatggtcttctttggcaatgtggattcatctgggataaaacacaatatttttaaccctccaattattgctcgatacatccgtttgcacccaactcattatagcattcgcagcactcttcgcatggagttgatgggctgtgatttaaatagttgcagcatgccattgggaatggagagtaaagcaatatcagatgcacagattactgcttcatcctactttaccaatatgtttgccacctggtctccttcaaaagctcgacttcacctccaagggaggagtaatgcctggagacctcaggtgaataatccaaaagagtggctgcaagtggacttccagaagacaatgaaagtcacaggagtaactactcagggagtaaaatctctgcttaccagcatgtatgtgaaggagttcctcatctccagcagtcaagatggccatcagtggactctcttttttcagaatggcaaagtaaaggtttttcagggaaatcaagactccttcacacctgtggtgaactctctagacccaccgttactgactcgctaccttcgaattcacccccagagttgggtgcaccagattgccctgaggatggaggttctgggctgcgaggcacaggacctctacggcgcgccaggtacctcagagtctgctacccccgagtcagggccaggatcagagccagccacctccgggtctgagacacccgggacttccgagagtgccacccctgagtccggacccgggtccgagcccgccacttccggctccgaaactcccggcacaagcgagagcgctaccccagagtcaggaccaggaacatctacagagccctctgaaggctccgctccagggtccccagccggcagtcccactagcaccgaggagggaacctctgaaagcgccacacccgaatcagggccagggtctgagcctgctaccagcggcagcgagacaccaggcacctctgagtccgccacaccagagtccggacccggatctcccgctgggagccccacctccactgaggagggatctcctgctggctctccaacatctactgaggaaggtacctcaaccgagccatccgagggatcagctcccggcacctcagagtcggcaaccccggagtctggacccggaacttccgaaagtgccacaccagagtccggtcccgggacttcagaatcagcaacacccgagtccggccctgggtctgaacccgccacaagtggtagtgagacaccaggatcagaacctgctacctcagggtcagagacacccggatctccggcaggctcaccaacctccactgaggagggcaccagcacagaaccaagcgagggctccgcacccggaacaagcactgaacccagtgagggttcagcacccggctctgagccggccacaagtggcagtgagacacccggcacttcagagagtgccacccccgagagtggcccaggcactagtaccgagccctctgaaggcagtgcgccagcctcgagcgaacaaaaactcatctcagaagaggatctgtcacctgcaaccggtcatcatcaccatcaccattga

SEQ ID NO: 1157 - protein, 2203 aa, synthetic construct
  REGION 1..2203: note = Description of Artificial Sequence: Synthetic polypeptide
ATRRYYLGAVELSWDYMQGAPGSSPSASTGTGPGSSPSASTGTGPGASPGTSSTGSPGASPGTSSTGSPGSSTPSGATGSPGSSPSASTGTGPGASPGTSSTGSPGSSPSASTGTGPGTPGSGTASSSPGSSTPSGATGSPGSSTPSGATGSPGASPGTSSTGSPASSSDLGELPVDARFPPRVPKSFPFNTSVVYKKTLFVEFTDHLFNIAKPRPPWMGLLGPTIQAEVYDTVVITLKNMASHPVSLHAVGVSYWKASEGAEYDDQTSQREKEDDKVFPGGSHTYVWQVLKENGPMASDPLCLTYSYLSHVDLVKDLNSGLIGALLVCREGSLAKEKTQTLHKFILLFAVFDEGKSWHSETKNSLMQDRDAASARAWPKMHTVNGYVNRSLPGLIGCHRKSVYWHVIGMGTTPEVHSIFLEGHTFLVRNHRQASLEISPITFLTAQTLLMDLGQFLLFCHISSHQHDGMEAYVKVDSCPEEPQLRMKNNEEAEDYDDDLTDSEMDVVRFDDDNSPSFIQIRSVAKKHPKTWVHYIAAEEEDWDYAPLVLAPDDRSYKSQYLNNGPQRIGRKYKKVRFMAYTDETFKTREAIQHESGILGPLLYGEVGDTLLIIFKNQASRPYNIYPHGITDVRPLYSRRLPKGVKHLKDFPILPGEIFKYKWTVTVEDGPTKSDPRCLTRYYSSFVNMERDLASGLIGPLLICYKESVDQRGNQIMSDKRNVILFSVFDENRSWYLTENIQRFLPNPAGVQLEDPEFQASNIMHSINGYVFDSLQLSVCLHEVAYWYILSIGAQTDFLSVFFSGYTFKHKMVYEDTLTLFPFSGETVFMSMENPGLWILGCHNSDFRNRGMTALLKVSSCDKNTGDYYEDSYEDISAYLLSKNNAIEPRSFSQNPPVLKRHQREITRTTLQGAPGTPGSGTASSSPGASPGTSSTGSPGASPGTSSTGSPGASPGTSSTGSPGSSPSASTGTGPGTPGSGTASSSPGASPGTSSTGSPGASPGTSSTGSPGASPGTSSTGSPGSSTPSGATGSPGSSTPSGATGSPGASPGTSSTGSPASSSDQEEIDYDDTISVEMKKEDFDIYDEDENQSPRSFQKKTRHYFIAAVERLWDYGMSSSPHVLRNRAQSGSVPQFKKVVFQEFTDGSFTQPLYRGELNEHLGLLGPYIRAEVEDNIMVTFRNQASRPYSFYSSLISYEEDQRQGAEPRKNFVKPNETKTYFWKVQHHMAPTKDEFDCKAWAYFSDVDLEKDVHSGLIGPLLVCHTNTLNPAHGRQVTVQEFALFFTIFDETKSWYFTENMERNCRGAPTSESATPESGPGSEPATSGSETPGTSESATPESGPGSEPATSGSETPGTSESATPESGPGTSTEPSEGSAPGTSESATPESGPGSPAGSPTSTEEGSPAGSPTSTEEGSPAGSPTSTEEGTSESATPESGPGTSTEPSEGSAPGASSAPCNIQMEDPTFKENYRFHAINGYIMDTLPGLVMAQDQRIRWYLLSMGSNENIHSIHFSGHVFTVRKKEEYKMALYNLYPGVFETVEMLPSKAGIWRVECLIGEHLHAGMSTLFLVYSNKCQTPLGMASGHIRDFQITASGQYGQWAPKLARLHYSGSINAWSTKEPFSWIKVDLLAPMIIHGIKTQGARQKFSSLYISQFIIMYSLDGKKWQTYRGNSTGTLMVFFGNVDSSGIKHNIFNPPIIARYIRLHPTHYSIRSTLRMELMGCDLNSCSMPLGMESKAISDAQITASSYFTNMFATWSPSKARLHLQGRSNAWRPQVNNPKEWLQVDFQKTMKVTGVTTQGVKSLLTSMYVKEFLISSSQDGHQWTLFFQNGKVKVFQGNQDSFTPVVNSLDPPLLTRYLRIHPQSWVHQIALRMEVLGCEAQDLYGAPGTSESATPESGPGSEPATSGSETPGTSESATPESGPGSEPATSGSETPGTSESATPESGPGTSTEPSEGSAPGSPAGSPTSTEEGTSESATPESGPGSEPATSGSETPGTSESATPESGPGSPAGSPTSTEEGSPAGSPTSTEEGTSTEPSEGSAPGTSESATPESGPGTSESATPESGPGTSESATPESGPGSEPATSGSETPGSEPATSGSETPGSPAGSPTSTEEGTSTEPSEGSAPGTSTEPSEGSAPGSEPATSGSETPGTSESATPESGPGTSTEPSEGSAPASSEQKLISEEDLSPATGHHHHHH

SEQ ID NO: 1158 - DNA, 6612 bp, synthetic construct
  misc_feature 1..6612: note = Description of Artificial Sequence: Synthetic polynucleotide
  source 1..6612: mol_type = other DNA
gccaccagaagatactacctgggtgcagtggaactgtcatgggactatatgcaaggcgcgccaggctccagcccctccgcgagcacgggaaccggaccaggttcgtcaccctcagcatcaacggggacgggaccgggggcgtcaccaggaacgtcctccaccggctcgccgggtgcatcacccggaacgtcatcgaccggatcgccagggagctcgacgccatcaggcgcaacaggatcacctggctcaagccctagcgcgtcaaccggcacgggtccgggtgcctcccctggcacgtccagcaccggatcacccggatcgagcccatccgcctcaaccggaaccggacccggtacaccagggtcgggaacagcctcctcgtcaccaggctcctcaaccccctcgggagccacgggttcgcccggttcgtcaacgccttccggagcaactggtagccccggagcatcgccaggaacttcgagcacggggtcgcccgcctcgagcagtgatctcggtgagctgcctgtggacgcaagatttcctcctagagtgccaaaatcttttccattcaacacctcagtcgtgtacaaaaagactctgtttgtagaattcacggatcaccttttcaacatcgctaagccaaggccaccctggatgggtctgctaggtcctaccatccaggctgaggtttatgatacagtggtcattacacttaagaacatggcttcccatcctgtcagtcttcatgctgttggtgtatcctactggaaagcttctgagggagctgaatatgatgatcagaccagtcaaagggagaaagaagatgataaagtcttccctggtggaagccatacatatgtctggcaggtcctgaaagagaatggtccaatggcctctgacccactgtgccttacctactcatatctttctcatgtggacctggtaaaagacttgaattcaggcctcattggagccctactagtatgtagagaagggagtctggccaaggaaaagacacagaccttgcacaaatttatactactttttgctgtatttgatgaagggaaaagttggcactcagaaacaaagaactccttgatgcaggatagggatgctgcatctgctcgggcctggcctaaaatgcacacagtcaatggttatgtaaacaggtctctgccaggtctgattggatgccacaggaaatcagtctattggcatgtgattggaatgggcaccactcctgaagtgcactcaatattcctcgaaggtcacacatttcttgtgaggaaccatcgccaggctagcttggaaatctcgccaataactttccttactgctcaaacactcttgatggaccttggacagtttctactgttttgtcatatctcttcccaccaacatgatggcatggaagcttatgtcaaagtagacagctgtccagaggaaccccaactacgaatgaaaaataatgaagaagcggaagactatgatgatgatcttactgattctgaaatggatgtggtcaggtttgatgatgacaactctccttcctttatccaaattcgctcagttgccaagaagcatcctaaaacttgggtacattacattgctgctgaagaggaggactgggactatgctcccttagtcctcgcccccgatgacagaagttataaaagtcaatatttgaacaatggccctcagcggattggtaggaagtacaaaaaagtccgatttatggcatacacagatgaaacctttaagactcgtgaagctattcagcatgaatcaggaatcttgggacctttactttatggggaagttggagacacactgttgattatatttaagaatcaagcaagcagaccatataacatctaccctcacggaatcactgatgtccgtcctttgtattcaaggagattaccaaaaggtgtaaaacatttgaaggattttccaattctgccaggagaaatattcaaatataaatggacagtgactgtagaagatgggccaactaaatcagatcctcggtgcctgacccgctattactctagtttcgttaatatggagagagatctagcttcaggactcattggccctctcctcatctgctacaaagaatctgtagatcaaagaggaaaccagataatgtcagacaagaggaatgtcatcctgttttctgtatttgatgagaaccgaagctggtacctcacagagaatatacaacgctttctccccaatccagctggagtgcagcttgaggatccagagttccaagcctccaacatcatgcacagcatcaatggctatgtttttgatagtttgcagttgtcagtttgtttgcatgaggtggcatactggtacattctaagcattggagcacagactgacttcctttctgtcttcttctctggatataccttcaaacacaaaatggtctatgaagacacactcaccctattcccattctcaggagaaactgtcttcatgtcgatggaaaacccaggtctatggattctggggtgccacaactcagactttcggaacagaggcatgaccgccttactgaaggtttctagttgtgacaagaacactggtgattattacgaggacagttatgaagatatttcagcatacttgctgagtaaaaacaatgccattgaaccaagaagcttctctcaaaacccaccagtcttgaaacgccatcaacgggaaataactcgtactactcttcagggcgcgccaggtacacccggatcgggtacagcgtcatcgagccccggtgcgtcacctggtacgtcgagcacggggtcgccaggggcgtcccctgggacgtcctcaacaggctcgcccggtgcgtcacccggcacgtcgtccacgggttcacctggtagctccccttccgcgtccactggcaccgggcctggaactccggggagcggcacagcgagctcgtcgccgggagcatcgcctgggacatcgagcaccgggtcgccaggagcatcgcccggaacatccagcacaggaagccccggcgcgtcgcccgggacatcaagcacaggttccccgggatcgagcacgccgtccggagccactggatcaccagggagctcgacaccttccggcgcaacgggatcgcccggagccagcccgggtacgtcaagcactggctcccctgcctcgagctcagatcaagaggaaatcgattatgatgataccatatcagttgaaatgaagaaggaagattttgacatttatgatgaggatgaaaatcagagcccccgcagctttcaaaagaaaacacgacactattttattgctgcagtggagaggctctgggattatgggatgagtagctccccacatgttctaagaaacagggctcagagtggcagtgtccctcagttcaagaaagttgttttccaggaatttactgatggctcctttactcagcccttataccgtggagaactaaatgaacatttgggactcctggggccatatataagagcagaagttgaagataatatcatggtaactttcagaaatcaggcctctcgtccctattccttctattctagccttatttcttatgaggaagatcagaggcaaggagcagaacctagaaaaaactttgtcaagcctaatgaaaccaaaacttacttttggaaagtgcaacatcatatggcacccactaaagatgagtttgactgcaaagcctgggcttatttctctgatgttgacctggaaaaagatgtgcactcaggcctgattggaccccttctggtctgccacactaacacactgaaccctgctcatgggagacaagtgacagtacaggaatttgctctgtttttcaccatctttgatgagaccaaaagctggtacttcactgaaaatatggaaagaaactgcaggggcgcgccaacgtccgaaagtgctacccctgagtcaggccctggtagtgagcctgccacaagcggaagcgaaactccggggacctcagagtctgccactcccgaatcggggccaggctctgaaccggccacttcagggagcgaaacaccaggaacatcggagagcgctaccccggagagcgggccaggaactagtactgagcctagcgagggaagtgcacctggtacaagcgagtccgccacacccgagtctggccctggctctccagcgggctcacccacgagcactgaagagggctctcccgctggcagcccaacgtcgacagaagaaggatcaccagcaggctcccccacatcaacagaggagggtacatcagaatctgctactcccgagagtggacccggtacctccactgagcccagcgaggggagtgcaccaggtgcctcgagcgctccctgcaatatccagatggaagatcccacttttaaagagaattatcgcttccatgcaatcaatggctacataatggatacactacctggcttagtaatggctcaggatcaaaggattcgatggtatctgctcagcatgggcagcaatgaaaacatccattctattcatttcagtggacatgtgttcactgtacgaaaaaaagaggagtataaaatggcactgtacaatctctatccaggtgtttttgagacagtggaaatgttaccatccaaagctggaatttggcgggtggaatgccttattggcgagcatctacatgctgggatgagcacactttttctggtgtacagcaataagtgtcagactcccctgggaatggcttctggacacattagagattttcagattacagcttcaggacaatatggacagtgggccccaaagctggccagacttcattattccggatcaatcaatgcctggagcaccaaggagcccttttcttggatcaaggtggatctgttggcaccaatgattattcacggcatcaagacccagggtgcccgtcagaagttctccagcctctacatctctcagtttatcatcatgtatagtcttgatgggaagaagtggcagacttatcgaggaaattccactggaaccttaatggtcttctttggcaatgtggattcatctgggataaaacacaatatttttaaccctccaattattgctcgatacatccgtttgcacccaactcattatagcattcgcagcactcttcgcatggagttgatgggctgtgatttaaatagttgcagcatgccattgggaatggagagtaaagcaatatcagatgcacagattactgcttcatcctactttaccaatatgtttgccacctggtctccttcaaaagctcgacttcacctccaagggaggagtaatgcctggagacctcaggtgaataatccaaaagagtggctgcaagtggacttccagaagacaatgaaagtcacaggagtaactactcagggagtaaaatctctgcttaccagcatgtatgtgaaggagttcctcatctccagcagtcaagatggccatcagtggactctcttttttcagaatggcaaagtaaaggtttttcagggaaatcaagactccttcacacctgtggtgaactctctagacccaccgttactgactcgctaccttcgaattcacccccagagttgggtgcaccagattgccctgaggatggaggttctgggctgcgaggcacaggacctctacggcgcgccaggtacctcagagtctgctacccccgagtcagggccaggatcagagccagccacctccgggtctgagacacccgggacttccgagagtgccacccctgagtccggacccgggtccgagcccgccacttccggctccgaaactcccggcacaagcgagagcgctaccccagagtcaggaccaggaacatctacagagccctctgaaggctccgctccagggtccccagccggcagtcccactagcaccgaggagggaacctctgaaagcgccacacccgaatcagggccagggtctgagcctgctaccagcggcagcgagacaccaggcacctctgagtccgccacaccagagtccggacccggatctcccgctgggagccccacctccactgaggagggatctcctgctggctctccaacatctactgaggaaggtacctcaaccgagccatccgagggatcagctcccggcacctcagagtcggcaaccccggagtctggacccggaacttccgaaagtgccacaccagagtccggtcccgggacttcagaatcagcaacacccgagtccggccctgggtctgaacccgccacaagtggtagtgagacaccaggatcagaacctgctacctcagggtcagagacacccggatctccggcaggctcaccaacctccactgaggagggcaccagcacagaaccaagcgagggctccgcacccggaacaagcactgaacccagtgagggttcagcacccggctctgagccggccacaagtggcagtgagacacccggcacttcagagagtgccacccccgagagtggcccaggcactagtaccgagccctctgaaggcagtgcgccagcctcgagcgaacaaaaactcatctcagaagaggatctgtcacctgcaaccggtcatcatcaccatcaccattga

SEQ ID NO: 1159 - protein, 2206 aa, synthetic construct
  REGION 1..2206: note = Description of Artificial Sequence: Synthetic polypeptide
ATRRYYLGAVELSWDYMQGAPGSSPSASTGTGPGSSPSASTGTGPGASPGTSSTGSPGASPGTSSTGSPGSSTPSGATGSPGSSPSASTGTGPGASPGTSSTGSPGSSPSASTGTGPGTPGSGTASSSPGSSTPSGATGSPGSSTPSGATGSPGASPGTSSTGSPASSSDLGELPVDARFPPRVPKSFPFNTSVVYKKTLFVEFTDHLFNIAKPRPPWMGLLGPTIQAEVYDTVVITLKNMASHPVSLHAVGVSYWKASEGAEYDDQTSQREKEDDKVFPGGSHTYVWQVLKENGPMASDPLCLTYSYLSHVDLVKDLNSGLIGALLVCREGSLAKEKTQTLHKFILLFAVFDEGKSWHSETKNSLMQDRDAASARAWPKMHTVNGYVNRSLPGLIGCHRKSVYWHVIGMGTTPEVHSIFLEGHTFLVRNHRQASLEISPITFLTAQTLLMDLGQFLLFCHISSHQHDGMEAYVKVDSCPEEPQLRMKNNEEAEDYDDDLTDSEMDVVRFDDDNSPSFIQIRSVAKKHPKTWVHYIAAEEEDWDYAPLVLAPDDRSYKSQYLNNGPQRIGRKYKKVRFMAYTDETFKTREAIQHESGILGPLLYGEVGDTLLIIFKNQASRPYNIYPHGITDVRPLYSRRLPKGVKHLKDFPILPGEIFKYKWTVTVEDGPTKSDPRCLTRYYSSFVNMERDLASGLIGPLLICYKESVDQRGNQIMSDKRNVILFSVFDENRSWYLTENIQRFLPNPAGVQLEDPEFQASNIMHSINGYVFDSLQLSVCLHEVAYWYILSIGAQTDFLSVFFSGYTFKHKMVYEDTLTLFPFSGETVFMSMENPGLWILGCHNSDFRNRGMTALLKVSSCDKNTGDYYEDSYEDISAYLLSKNNAIEPRSFSQNPPVLKRHQREITRTTLQSDQEEIDYDDTISVEMKKEDFDIYDEDENQSPRSFQKKTRHYFIAAVERLWDYGMSSSPHVLRNRAQGAPGTPGSGTASSSPGASPGTSSTGSPGASPGTSSTGSPGASPGTSSTGSPGSSPSASTGTGPGTPGSGTASSSPGASPGTSSTGSPGASPGTSSTGSPGASPGTSSTGSPGSSTPSGATGSPGSSTPSGATGSPGASPGTSSTGSPASSRAQSGSVPQFKKVVFQEFTDGSFTQPLYRGELNEHLGLLGPYIRAEVEDNIMVTFRNQASRPYSFYSSLISYEEDQRQGAEPRKNFVKPNETKTYFWKVQHHMAPTKDEFDCKAWAYFSDVDLEKDVHSGLIGPLLVCHTNTLNPAHGRQVTVQEFALFFTIFDETKSWYFTENMERNCRGAPTSESATPESGPGSEPATSGSETPGTSESATPESGPGSEPATSGSETPGTSESATPESGPGTSTEPSEGSAPGTSESATPESGPGSPAGSPTSTEEGSPAGSPTSTEEGSPAGSPTSTEEGTSESATPESGPGTSTEPSEGSAPGASSAPCNIQMEDPTFKENYRFHAINGYIMDTLPGLVMAQDQRIRWYLLSMGSNENIHSIHFSGHVFTVRKKEEYKMALYNLYPGVFETVEMLPSKAGIWRVECLIGEHLHAGMSTLFLVYSNKCQTPLGMASGHIRDFQITASGQYGQWAPKLARLHYSGSINAWSTKEPFSWIKVDLLAPMIIHGIKTQGARQKFSSLYISQFIIMYSLDGKKWQTYRGNSTGTLMVFFGNVDSSGIKHNIFNPPIIARYIRLHPTHYSIRSTLRMELMGCDLNSCSMPLGMESKAISDAQITASSYFTNMFATWSPSKARLHLQGRSNAWRPQVNNPKEWLQVDFQKTMKVTGVTTQGVKSLLTSMYVKEFLISSSQDGHQWTLFFQNGKVKVFQGNQDSFTPVVNSLDPPLLTRYLRIHPQSWVHQIALRMEVLGCEAQDLYGAPGTSESATPESGPGSEPATSGSETPGTSESATPESGPGSEPATSGSETPGTSESATPESGPGTSTEPSEGSAPGSPAGSPTSTEEGTSESATPESGPGSEPATSGSETPGTSESATPESGPGSPAGSPTSTEEGSPAGSPTSTEEGTSTEPSEGSAPGTSESATPESGPGTSESATPESGPGTSESATPESGPGSEPATSGSETPGSEPATSGSETPGSPAGSPTSTEEGTSTEPSEGSAPGTSTEPSEGSAPGSEPATSGSETPGTSESATPESGPGTSTEPSEGSAPASSEQKLISEEDLSPATGHHHHHH

SEQ ID NO: 1160 - DNA, 6621 bp, synthetic construct
  misc_feature 1..6621: note = Description of Artificial Sequence: Synthetic polynucleotide
  source 1..6621: mol_type = other DNA
gccaccagaagatactacctgggtgcagtggaactgtcatgggactatatgcaaggcgcgccaggctccagcccctccgcgagcacgggaaccggaccaggttcgtcaccctcagcatcaacggggacgggaccgggggcgtcaccaggaacgtcctccaccggctcgccgggtgcatcacccggaacgtcatcgaccggatcgccagggagctcgacgccatcaggcgcaacaggatcacctggctcaagccctagcgcgtcaaccggcacgggtccgggtgcctcccctggcacgtccagcaccggatcacccggatcgagcccatccgcctcaaccggaaccggacccggtacaccagggtcgggaacagcctcctcgtcaccaggctcctcaaccccctcgggagccacgggttcgcccggttcgtcaacgccttccggagcaactggtagccccggagcatcgccaggaacttcgagcacggggtcgcccgcctcgagcagtgatctcggtgagctgcctgtggacgcaagatttcctcctagagtgccaaaatcttttccattcaacacctcagtcgtgtacaaaaagactctgtttgtagaattcacggatcaccttttcaacatcgctaagccaaggccaccctggatgggtctgctaggtcctaccatccaggctgaggtttatgatacagtggtcattacacttaagaacatggcttcccatcctgtcagtcttcatgctgttggtgtatcctactggaaagcttctgagggagctgaatatgatgatcagaccagtcaaagggagaaagaagatgataaagtcttccctggtggaagccatacatatgtctggcaggtcctgaaagagaatggtccaatggcctctgacccactgtgccttacctactcatatctttctcatgtggacctggtaaaagacttgaattcaggcctcattggagccctactagtatgtagagaagggagtctggccaaggaaaagacacagaccttgcacaaatttatactactttttgctgtatttgatgaagggaaaagttggcactcagaaacaaagaactccttgatgcaggatagggatgctgcatctgctcgggcctggcctaaaatgcacacagtcaatggttatgtaaacaggtctctgccaggtctgattggatgccacaggaaatcagtctattggcatgtgattggaatgggcaccactcctgaagtgcactcaatattcctcgaaggtcacacatttcttgtgaggaaccatcgccaggctagcttggaaatctcgccaataactttccttactgctcaaacactcttgatggaccttggacagtttctactgttttgtcatatctcttcccaccaacatgatggcatggaagcttatgtcaaagtagacagctgtccagaggaaccccaactacgaatgaaaaataatgaagaagcggaagactatgatgatgatcttactgattctgaaatggatgtggtcaggtttgatgatgacaactctccttcctttatccaaattcgctcagttgccaagaagcatcctaaaacttgggtacattacattgctgctgaagaggaggactgggactatgctcccttagtcctcgcccccgatgacagaagttataaaagtcaatatttgaacaatggccctcagcggattggtaggaagtacaaaaaagtccgatttatggcatacacagatgaaacctttaagactcgtgaagctattcagcatgaatcaggaatcttgggacctttactttatggggaagttggagacacactgttgattatatttaagaatcaagcaagcagaccatataacatctaccctcacggaatcactgatgtccgtcctttgtattcaaggagattaccaaaaggtgtaaaacatttgaaggattttccaattctgccaggagaaatattcaaatataaatggacagtgactgtagaagatgggccaactaaatcagatcctcggtgcctgacccgctattactctagtttcgttaatatggagagagatctagcttcaggactcattggccctctcctcatctgctacaaagaatctgtagatcaaagaggaaaccagataatgtcagacaagaggaatgtcatcctgttttctgtatttgatgagaaccgaagctggtacctcacagagaatatacaacgctttctccccaatccagctggagtgcagcttgaggatccagagttccaagcctccaacatcatgcacagcatcaatggctatgtttttgatagtttgcagttgtcagtttgtttgcatgaggtggcatactggtacattctaagcattggagcacagactgacttcctttctgtcttcttctctggatataccttcaaacacaaaatggtctatgaagacacactcaccctattcccattctcaggagaaactgtcttcatgtcgatggaaaacccaggtctatggattctggggtgccacaactcagactttcggaacagaggcatgaccgccttactgaaggtttctagttgtgacaagaacactggtgattattacgaggacagttatgaagatatttcagcatacttgctgagtaaaaacaatgccattgaaccaagaagcttctctcaaaacccaccagtcttgaaacgccatcaacgggaaataactcgtactactcttcagtcagatcaagaggaaatcgattatgatgataccatatcagttgaaatgaagaaggaagattttgacatttatgatgaggatgaaaatcagagcccccgcagctttcaaaagaaaacacgacactattttattgctgcagtggagaggctctgggattatgggatgagtagctccccacatgttctaagaaacagggctcagggcgcgccaggtacacccggatcgggtacagcgtcatcgagccccggtgcgtcacctggtacgtcgagcacggggtcgccaggggcgtcccctgggacgtcctcaacaggctcgcccggtgcgtcacccggcacgtcgtccacgggttcacctggtagctccccttccgcgtccactggcaccgggcctggaactccggggagcggcacagcgagctcgtcgccgggagcatcgcctgggacatcgagcaccgggtcgccaggagcatcgcccggaacatccagcacaggaagccccggcgcgtcgcccgggacatcaagcacaggttccccgggatcgagcacgccgtccggagccactggatcaccagggagctcgacaccttccggcgcaacgggatcgcccggagccagcccgggtacgtcaagcactggctcccctgcctcgagcagggctcagagtggcagtgtccctcagttcaagaaagttgttttccaggaatttactgatggctcctttactcagcccttataccgtggagaactaaatgaacatttgggactcctggggccatatataagagcagaagttgaagataatatcatggtaactttcagaaatcaggcctctcgtccctattccttctattctagccttatttcttatgaggaagatcagaggcaaggagcagaacctagaaaaaactttgtcaagcctaatgaaaccaaaacttacttttggaaagtgcaacatcatatggcacccactaaagatgagtttgactgcaaagcctgggcttatttctctgatgttgacctggaaaaagatgtgcactcaggcctgattggaccccttctggtctgccacactaacacactgaaccctgctcatgggagacaagtgacagtacaggaatttgctctgtttttcaccatctttgatgagaccaaaagctggtacttcactgaaaatatggaaagaaactgcaggggcgcgccaacgtccgaaagtgctacccctgagtcaggccctggtagtgagcctgccacaagcggaagcgaaactccggggacctcagagtctgccactcccgaatcggggccaggctctgaaccggccacttcagggagcgaaacaccaggaacatcggagagcgctaccccggagagcgggccaggaactagtactgagcctagcgagggaagtgcacctggtacaagcgagtccgccacacccgagtctggccctggctctccagcgggctcacccacgagcactgaagagggctctcccgctggcagcccaacgtcgacagaagaaggatcaccagcaggctcccccacatcaacagaggagggtacatcagaatctgctactcccgagagtggacccggtacctccactgagcccagcgaggggagtgcaccaggtgcctcgagcgctccctgcaatatccagatggaagatcccacttttaaagagaattatcgcttccatgcaatcaatggctacataatggatacactacctggcttagtaatggctcaggatcaaaggattcgatggtatctgctcagcatgggcagcaatgaaaacatccattctattcatttcagtggacatgtgttcactgtacgaaaaaaagaggagtataaaatggcactgtacaatctctatccaggtgtttttgagacagtggaaatgttaccatccaaagctggaatttggcgggtggaatgccttattggcgagcatctacatgctgggatgagcacactttttctggtgtacagcaataagtgtcagactcccctgggaatggcttctggacacattagagattttcagattacagcttcaggacaatatggacagtgggccccaaagctggccagacttcattattccggatcaatcaatgcctggagcaccaaggagcccttttcttggatcaaggtggatctgttggcaccaatgattattcacggcatcaagacccagggtgcccgtcagaagttctccagcctctacatctctcagtttatcatcatgtatagtcttgatgggaagaagtggcagacttatcgaggaaattccactggaaccttaatggtcttctttggcaatgtggattcatctgggataaaacacaatatttttaaccctccaattattgctcgatacatccgtttgcacccaactcattatagcattcgcagcactcttcgcatggagttgatgggctgtgatttaaatagttgcagcatgccattgggaatggagagtaaagcaatatcagatgcacagattactgcttcatcctactttaccaatatgtttgccacctggtctccttcaaaagctcgacttcacctccaagggaggagtaatgcctggagacctcaggtgaataatccaaaagagtggctgcaagtggacttccagaagacaatgaaagtcacaggagtaactactcagggagtaaaatctctgcttaccagcatgtatgtgaaggagttcctcatctccagcagtcaagatggccatcagtggactctcttttttcagaatggcaaagtaaaggtttttcagggaaatcaagactccttcacacctgtggtgaactctctagacccaccgttactgactcgctaccttcgaattcacccccagagttgggtgcaccagattgccctgaggatggaggttctgggctgcgaggcacaggacctctacggcgcgccaggtacctcagagtctgctacccccgagtcagggccaggatcagagccagccacctccgggtctgagacacccgggacttccgagagtgccacccctgagtccggacccgggtccgagcccgccacttccggctccgaaactcccggcacaagcgagagcgctaccccagagtcaggaccaggaacatctacagagccctctgaaggctccgctccagggtccccagccggcagtcccactagcaccgaggagggaacctctgaaagcgccacacccgaatcagggccagggtctgagcctgctaccagcggcagcgagacaccaggcacctctgagtccgccacaccagagtccggacccggatctcccgctgggagccccacctccactgaggagggatctcctgctggctctccaacatctactgaggaaggtacctcaaccgagccatccgagggatcagctcccggcacctcagagtcggcaaccccggagtctggacccggaacttccgaaagtgccacaccagagtccggtcccgggacttcagaatcagcaacacccgagtccggccctgggtctgaacccgccacaagtggtagtgagacaccaggatcagaacctgctacctcagggtcagagacacccggatctccggcaggctcaccaacctccactgaggagggcaccagcacagaaccaagcgagggctccgcacccggaacaagcactgaacccagtgagggttcagcacccggctctgagccggccacaagtggcagtgagacacccggcacttcagagagtgccacccccgagagtggcccaggcactagtaccgagccctctgaaggcagtgcgccagcctcgagcgaacaaaaactcatctcagaagaggatctgtcacctgcaaccggtcatcatcaccatcaccattga

SEQ ID NO: 1161 - protein, 2356 aa, synthetic construct
  REGION 1..2356: note = Description of Artificial Sequence: Synthetic polypeptide
ATRRYYLGAVELSWDYMQGAPGSSPSASTGTGPGSSPSASTGTGPGASPGTSSTGSPGASPGTSSTGSPGSSTPSGATGSPGSSPSASTGTGPGASPGTSSTGSPGSSPSASTGTGPGTPGSGTASSSPGSSTPSGATGSPGSSTPSGATGSPGASPGTSSTGSPASSSDLGELPVDARFPPRVPKSFPFNTSVVYKKTLFVEFTDHLFNIAKPRPPWMGLLGPTIQAEVYDTVVITLKNMASHPVSLHAVGVSYWKASEGAEYDDQTSQREKEDDKVFPGGSHTYVWQVLKENGPMASDPLCLTYSYLSHVDLVKDLNSGLIGALLVCREGSLAKEKTQTLHKFILLFAVFDEGKSWHSETKNSLMQDRDAASARAWPKMHTVNGYVNRSLPGLIGCHRKSVYWHVIGMGTTPEVHSIFLEGHTFLVRNHRQASLEISPITFLTAQTLLMDLGQFLLFCHISSHQHDGMEAYVKVDSCPEEPQLRMKNNEEAEDYDDDLTDSEMDVVRFDDDNSPSFIQIRSVAKKHPKTWVHYIAAEEEDWDYAPLVLAPDGAPTSTEPSEGSAPGSPAGSPTSTEEGTSTEPSEGSAPGTSTEPSEGSAPGTSESATPESGPGTSTEPSEGSAPGTSESATPESGPGSEPATSGSETPGTSTEPSEGSAPGTSTEPSEGSAPGTSESATPESGPGTSESATPESGPGASSDRSYKSQYLNNGPQRIGRKYKKVRFMAYTDETFKTREAIQHESGILGPLLYGEVGDTLLIIFKNQASRPYNIYPHGITDVRPLYSRRLPKGVKHLKDFPILPGEIFKYKWTVTVEDGPTKSDPRCLTRYYSSFVNMERDLASGLIGPLLICYKESVDQRGNQIMSDKRNVILFSVFDENRSWYLTENIQRFLPNPAGVQLEDPEFQASNIMHSINGYVFDSLQLSVCLHEVAYWYILSIGAQTDFLSVFFSGYTFKHKMVYEDTLTLFPFSGETVFMSMENPGLWILGCHNSDFRNRGMTALLKVSSCDKNTGDYYEDSYEDISAYLLSKNNAIEPRSFSQNPPVLKRHQREITRTTLQGAPGTPGSGTASSSPGASPGTSSTGSPGASPGTSSTGSPGASPGTSSTGSPGSSPSASTGTGPGTPGSGTASSSPGASPGTSSTGSPGASPGTSSTGSPGASPGTSSTGSPGSSTPSGATGSPGSSTPSGATGSPGASPGTSSTGSPASSSDQEEIDYDDTISVEMKKEDFDIYDEDENQSPRSFQKKTRHYFIAAVERLWDYGMSSSPHVLRNRAQGAPGTPGSGTASSSPGASPGTSSTGSPGASPGTSSTGSPGASPGTSSTGSPGSSPSASTGTGPGTPGSGTASSSPGASPGTSSTGSPGASPGTSSTGSPGASPGTSSTGSPGSSTPSGATGSPGSSTPSGATGSPGASPGTSSTGSPASSRAQSGSVPQFKKVVFQEFTDGSFTQPLYRGELNEHLGLLGPYIRAEVEDNIMVTFRNQASRPYSFYSSLISYEEDQRQGAEPRKNFVKPNETKTYFWKVQHHMAPTKDEFDCKAWAYFSDVDLEKDVHSGLIGPLLVCHTNTLNPAHGRQVTVQEFALFFTIFDETKSWYFTENMERNCRAPCNIQMEDPTFKENYRFHAINGYIMDTLPGLVMAQDQRIRWYLLSMGSNENIHSIHFSGHVFTVRKKEEYKMALYNLYPGVFETVEMLPSKAGIWRVECLIGEHLHAGMSTLFLVYSNKCQTPLGMASGHIRDFQITASGQYGQWAPKLARLHYSGSINAWSTKEPFSWIKVDLLAPMIIHGIKTQGARQKFSSLYISQFIIMYSLDGKKWQTYRGNSTGTLMVFFGNVDSSGIKHNIFNPPIIARYIRLHPTHYSIRSTLRMELMGCDLNSCSMPLGMESKAISDAQITASSYFTNMFATWSPSKARLHLQGRSNAWRPQVNNPKEWLQVDFQKTMKVTGVTTQGVKSLLTSMYVKEFLISSSQDGHQWTLFFQNGKVKVFQGNQDSFTPVVNSLDPPLLTRYLRIHPQSWVHQIALRMEVLGCEAQDLYGAPGTSESATPESGPGSEPATSGSETPGTSESATPESGPGSEPATSGSETPGTSESATPESGPGTSTEPSEGSAPGSPAGSPTSTEEGTSESATPESGPGSEPATSGSETPGTSESATPESGPGSPAGSPTSTEEGSPAGSPTSTEEGTSTEPSEGSAPGTSESATPESGPGTSESATPESGPGTSESATPESGPGSEPATSGSETPGSEPATSGSETPGSPAGSPTSTEEGTSTEPSEGSAPGTSTEPSEGSAPGSEPATSGSETPGTSESATPESGPGTSTEPSEGSAPASSEQKLISEEDLSPATGHHHHHH

SEQ ID NO: 1162 - DNA, 7071 bp, synthetic construct
  misc_feature 1..7071: note = Description of Artificial Sequence: Synthetic polynucleotide
  source 1..7071: mol_type = other DNA
gccaccagaagatactacctgggtgcagtggaactgtcatgggactatatgcaaggcgcgccaggctccagcccctccgcgagcacgggaaccggaccaggttcgtcaccctcagcatcaacggggacgggaccgggggcgtcaccaggaacgtcctccaccggctcgccgggtgcatcacccggaacgtcatcgaccggatcgccagggagctcgacgccatcaggcgcaacaggatcacctggctcaagccctagcgcgtcaaccggcacgggtccgggtgcctcccctggcacgtccagcaccggatcacccggatcgagcccatccgcctcaaccggaaccggacccggtacaccagggtcgggaacagcctcctcgtcaccaggctcctcaaccccctcgggagccacgggttcgcccggttcgtcaacgccttccggagcaactggtagccccggagcatcgccaggaacttcgagcacggggtcgcccgcctcgagcagtgatctcggtgagctgcctgtggacgcaagatttcctcctagagtgccaaaatcttttccattcaacacctcagtcgtgtacaaaaagactctgtttgtagaattcacggatcaccttttcaacatcgctaagccaaggccaccctggatgggtctgctaggtcctaccatccaggctgaggtttatgatacagtggtcattacacttaagaacatggcttcccatcctgtcagtcttcatgctgttggtgtatcctactggaaagcttctgagggagctgaatatgatgatcagaccagtcaaagggagaaagaagatgataaagtcttccctggtggaagccatacatatgtctggcaggtcctgaaagagaatggtccaatggcctctgacccactgtgccttacctactcatatctttctcatgtggacctggtaaaagacttgaattcaggcctcattggagccctactagtatgtagagaagggagtctggccaaggaaaagacacagaccttgcacaaatttatactactttttgctgtatttgatgaagggaaaagttggcactcagaaacaaagaactccttgatgcaggatagggatgctgcatctgctcgggcctggcctaaaatgcacacagtcaatggttatgtaaacaggtctctgccaggtctgattggatgccacaggaaatcagtctattggcatgtgattggaatgggcaccactcctgaagtgcactcaatattcctcgaaggtcacacatttcttgtgaggaaccatcgccaggctagcttggaaatctcgccaataactttccttactgctcaaacactcttgatggaccttggacagtttctactgttttgtcatatctcttcccaccaacatgatggcatggaagcttatgtcaaagtagacagctgtccagaggaaccccaactacgaatgaaaaataatgaagaagcggaagactatgatgatgatcttactgattctgaaatggatgtggtcaggtttgatgatgacaactctccttcctttatccaaattcgctcagttgccaagaagcatcctaaaacttgggtacattacattgctgctgaagaggaggactgggactatgctcccttagtcctcgcccccgatggcgcgccaaccagtacggagccgtccgaggggagcgcaccaggaagcccggctgggagcccgacttctaccgaagagggtacatctaccgaaccaagtgaaggttcagcaccaggcacctcaacagaaccctctgagggctcggcgcctggtacaagtgagtccgccaccccagaatccgggcctgggacaagcacagaaccttcggaagggagtgcccctggaacatccgaatcggcaaccccagaatcagggccaggatctgagcccgcgacttcgggctccgagacgcctgggacatccaccgagccctccgaaggatcagccccaggcaccagcacggagccctctgagggaagcgcacctggtaccagcgaaagcgcaactcccgaatcaggtcccggtacgagcgagtcggcgaccccggagagcgggccaggtgcctcgagcgacagaagttataaaagtcaatatttgaacaatggccctcagcggattggtaggaagtacaaaaaagtccgatttatggcatacacagatgaaacctttaagactcgtgaagctattcagcatgaatcaggaatcttgggacctttactttatggggaagttggagacacactgttgattatatttaagaatcaagcaagcagaccatataacatctaccctcacggaatcactgatgtccgtcctttgtattcaaggagattaccaaaaggtgtaaaacatttgaaggattttccaattctgccaggagaaatattcaaatataaatggacagtgactgtagaagatgggccaactaaatcagatcctcggtgcctgacccgctattactctagtttcgttaatatggagagagatctagcttcaggactcattggccctctcctcatctgctacaaagaatctgtagatcaaagaggaaaccagataatgtcagacaagaggaatgtcatcctgttttctgtatttgatgagaaccgaagctggtacctcacagagaatatacaacgctttctccccaatccagctggagtgcagcttgaggatccagagttccaagcctccaacatcatgcacagcatcaatggctatgtttttgatagtttgcagttgtcagtttgtttgcatgaggtggcatactggtacattctaagcattggagcacagactgacttcctttctgtcttcttctctggatataccttcaaacacaaaatggtctatgaagacacactcaccctattcccattctcaggagaaactgtcttcatgtcgatggaaaacccaggtctatggattctggggtgccacaactcagactttcggaacagaggcatgaccgccttactgaaggtttctagttgtgacaagaacactggtgattattacgaggacagttatgaagatatttcagcatacttgctgagtaaaaacaatgccattgaaccaagaagcttctctcaaaacccaccagtcttgaaacgccatcaacgggaaataactcgtactactcttcagggcgcgccaggtacacccggatcgggtacagcgtcatcgagccccggtgcgtcacctggtacgtcgagcacggggtcgccaggggcgtcccctgggacgtcctcaacaggctcgcccggtgcgtcacccggcacgtcgtccacgggttcacctggtagctccccttccgcgtccactggcaccgggcctggaactccggggagcggcacagcgagctcgtcgccgggagcatcgcctgggacatcgagcaccgggtcgccaggagcatcgcccggaacatccagcacaggaagccccggcgcgtcgcccgggacatcaagcacaggttccccgggatcgagcacgccgtccggagccactggatcaccagggagctcgacaccttccggcgcaacgggatcgcccggagccagcccgggtacgtcaagcactggctcccctgcctcgagctcagatcaagaggaaatcgattatgatgataccatatcagttgaaatgaagaaggaagattttgacatttatgatgaggatgaaaatcagagcccccgcagctttcaaaagaaaacacgacactattttattgctgcagtggagaggctctgggattatgggatgagtagctccccacatgttctaagaaacagggctcagggcgcgccaggtacacccggatcgggtacagcgtcatcgagccccggtgcgtcacctggtacgtcgagcacggggtcgccaggggcgtcccctgggacgtcctcaacaggctcgcccggtgcgtcacccggcacgtcgtccacgggttcacctggtagctccccttccgcgtccactggcaccgggcctggaactccggggagcggcacagcgagctcgtcgccgggagcatcgcctgggacatcgagcaccgggtcgccaggagcatcgcccggaacatccagcacaggaagccccggcgcgtcgcccgggacatcaagcacaggttccccgggatcgagcacgccgtccggagccactggatcaccagggagctcgacaccttccggcgcaacgggatcgcccggagccagcccgggtacgtcaagcactggctcccctgcctcgagcagggctcagagtggcagtgtccctcagttcaagaaagttgttttccaggaatttactgatggctcctttactcagcccttataccgtggagaactaaatgaacatttgggactcctggggccatatataagagcagaagttgaagataatatcatggtaactttcagaaatcaggcctctcgtccctattccttctattctagccttatttcttatgaggaagatcagaggcaaggagcagaacctagaaaaaactttgtcaagcctaatgaaaccaaaacttacttttggaaagtgcaacatcatatggcacccactaaagatgagtttgactgcaaagcctgggcttatttctctgatgttgacctggaaaaagatgtgcactcaggcctgattggaccccttctggtctgccacactaacacactgaaccctgctcatgggagacaagtgacagtacaggaatttgctctgtttttcaccatctttgatgagaccaaaagctggtacttcactgaaaatatggaaagaaactgcagggctccctgcaatatccagatggaagatcccacttttaaagagaattatcgcttccatgcaatcaatggctacataatggatacactacctggcttagtaatggctcaggatcaaaggattcgatggtatctgctcagcatgggcagcaatgaaaacatccattctattcatttcagtggacatgtgttcactgtacgaaaaaaagaggagtataaaatggcactgtacaatctctatccaggtgtttttgagacagtggaaatgttaccatccaaagctggaatttggcgggtggaatgccttattggcgagcatctacatgctgggatgagcacactttttctggtgtacagcaataagtgtcagactcccctgggaatggcttctggacacattagagattttcagattacagcttcaggacaatatggacagtgggccccaaagctggccagacttcattattccggatcaatcaatgcctggagcaccaaggagcccttttcttggatcaaggtggatctgttggcaccaatgattattcacggcatcaagacccagggtgcccgtcagaagttctccagcctctacatctctcagtttatcatcatgtatagtcttgatgggaagaagtggcagacttatcgaggaaattccactggaaccttaatggtcttctttggcaatgtggattcatctgggataaaacacaatatttttaaccctccaattattgctcgatacatccgtttgcacccaactcattatagcattcgcagcactcttcgcatggagttgatgggctgtgatttaaatagttgcagcatgccattgggaatggagagtaaagcaatatcagatgcacagattactgcttcatcctactttaccaatatgtttgccacctggtctccttcaaaagctcgacttcacctccaagggaggagtaatgcctggagacctcaggtgaataatccaaaagagtggctgcaagtggacttccagaagacaatgaaagtcacaggagtaactactcagggagtaaaatctctgcttaccagcatgtatgtgaaggagttcctcatctccagcagtcaagatggccatcagtggactctcttttttcagaatggcaaagtaaaggtttttcagggaaatcaagactccttcacacctgtggtgaactctctagacccaccgttactgactcgctaccttcgaattcacccccagagttgggtgcaccagattgccctgaggatggaggttctgggctgcgaggcacaggacctctacggcgcgccaggtacctcagagtctgctacccccgagtcagggccaggatcagagccagccacctccgggtctgagacacccgggacttccgagagtgccacccctgagtccggacccgggtccgagcccgccacttccggctccgaaactcccggcacaagcgagagcgctaccccagagtcaggaccaggaacatctacagagccctctgaaggctccgctccagggtccccagccggcagtcccactagcaccgaggagggaacctctgaaagcgccacacccgaatcagggccagggtctgagcctgctaccagcggcagcgagacaccaggcacctctgagtccgccacaccagagtccggacccggatctcccgctgggagccccacctccactgaggagggatctcctgctggctctccaacatctactgaggaaggtacctcaaccgagccatccgagggatcagctcccggcacctcagagtcggcaaccccggagtctggacccggaacttccgaaagtgccacaccagagtccggtcccgggacttcagaatcagcaacacccgagtccggccctgggtctgaacccgccacaagtggtagtgagacaccaggatcagaacctgctacctcagggtcagagacacccggatctccggcaggctcaccaacctccactgaggagggcaccagcacagaaccaagcgagggctccgcacccggaacaagcactgaacccagtgagggttcagcacccggctctgagccggccacaagtggcagtgagacacccggcacttcagagagtgccacccccgagagtggcccaggcactagtaccgagccctctgaaggcagtgcgccagcctcgagcgaacaaaaactcatctcagaagaggatctgtcacctgcaaccggtcatcatcaccatcaccattga

SEQ ID NO: 1163 - protein, 2353 aa, synthetic construct
  REGION 1..2353: note = Description of Artificial Sequence: Synthetic polypeptide
ATRRYYLGAVELSWDYMQGAPGSSPSASTGTGPGSSPSASTGTGPGASPGTSSTGSPGASPGTSSTGSPGSSTPSGATGSPGSSPSASTGTGPGASPGTSSTGSPGSSPSASTGTGPGTPGSGTASSSPGSSTPSGATGSPGSSTPSGATGSPGASPGTSSTGSPASSSDLGELPVDARFPPRVPKSFPFNTSVVYKKTLFVEFTDHLFNIAKPRPPWMGLLGPTIQAEVYDTVVITLKNMASHPVSLHAVGVSYWKASEGAEYDDQTSQREKEDDKVFPGGSHTYVWQVLKENGPMASDPLCLTYSYLSHVDLVKDLNSGLIGALLVCREGSLAKEKTQTLHKFILLFAVFDEGKSWHSETKNSLMQDRDAASARAWPKMHTVNGYVNRSLPGLIGCHRKSVYWHVIGMGTTPEVHSIFLEGHTFLVRNHRQASLEISPITFLTAQTLLMDLGQFLLFCHISSHQHDGMEAYVKVDSCPEEPQLRMKNNEEAEDYDDDLTDSEMDVVRFDDDNSPSFIQIRSVAKKHPKTWVHYIAAEEEDWDYAPLVLAPDGAPTSTEPSEGSAPGSPAGSPTSTEEGTSTEPSEGSAPGTSTEPSEGSAPGTSESATPESGPGTSTEPSEGSAPGTSESATPESGPGSEPATSGSETPGTSTEPSEGSAPGTSTEPSEGSAPGTSESATPESGPGTSESATPESGPGASSDRSYKSQYLNNGPQRIGRKYKKVRFMAYTDETFKTREAIQHESGILGPLLYGEVGDTLLIIFKNQASRPYNIYPHGITDVRPLYSRRLPKGVKHLKDFPILPGEIFKYKWTVTVEDGPTKSDPRCLTRYYSSFVNMERDLASGLIGPLLICYKESVDQRGNQIMSDKRNVILFSVFDENRSWYLTENIQRFLPNPAGVQLEDPEFQASNIMHSINGYVFDSLQLSVCLHEVAYWYILSIGAQTDFLSVFFSGYTFKHKMVYEDTLTLFPFSGETVFMSMENPGLWILGCHNSDFRNRGMTALLKVSSCDKNTGDYYEDSYEDISAYLLSKNNAIEPRSFSQNPPVLKRHQREITRTTLQGAPGTPGSGTASSSPGASPGTSSTGSPGASPGTSSTGSPGASPGTSSTGSPGSSPSASTGTGPGTPGSGTASSSPGASPGTSSTGSPGASPGTSSTGSPGASPGTSSTGSPGSSTPSGATGSPGSSTPSGATGSPGASPGTSSTGSPASSSDQEEIDYDDTISVEMKKEDFDIYDEDENQSPRSFQKKTRHYFIAAVERLWDYGMSSSPHVLRNRAQSGSVPQFKKVVFQEFTDGSFTQPLYRGELNEHLGLLGPYIRAEVEDNIMVTFRNQASRPYSFYSSLISYEEDQRQGAEPRKNFVKPNETKTYFWKVQHHMAPTKDEFDCKAWAYFSDVDLEKDVHSGLIGPLLVCHTNTLNPAHGRQVTVQEFALFFTIFDETKSWYFTENMERNCRGAPTSESATPESGPGSEPATSGSETPGTSESATPESGPGSEPATSGSETPGTSESATPESGPGTSTEPSEGSAPGTSESATPESGPGSPAGSPTSTEEGSPAGSPTSTEEGSPAGSPTSTEEGTSESATPESGPGTSTEPSEGSAPGASSAPCNIQMEDPTFKENYRFHAINGYIMDTLPGLVMAQDQRIRWYLLSMGSNENIHSIHFSGHVFTVRKKEEYKMALYNLYPGVFETVEMLPSKAGIWRVECLIGEHLHAGMSTLFLVYSNKCQTPLGMASGHIRDFQITASGQYGQWAPKLARLHYSGSINAWSTKEPFSWIKVDLLAPMIIHGIKTQGARQKFSSLYISQFIIMYSLDGKKWQTYRGNSTGTLMVFFGNVDSSGIKHNIFNPPIIARYIRLHPTHYSIRSTLRMELMGCDLNSCSMPLGMESKAISDAQITASSYFTNMFATWSPSKARLHLQGRSNAWRPQVNNPKEWLQVDFQKTMKVTGVTTQGVKSLLTSMYVKEFLISSSQDGHQWTLFFQNGKVKVFQGNQDSFTPVVNSLDPPLLTRYLRIHPQSWVHQIALRMEVLGCEAQDLYGAPGTSESATPESGPGSEPATSGSETPGTSESATPESGPGSEPATSGSETPGTSESATPESGPGTSTEPSEGSAPGSPAGSPTSTEEGTSESATPESGPGSEPATSGSETPGTSESATPESGPGSPAGSPTSTEEGSPAGSPTSTEEGTSTEPSEGSAPGTSESATPESGPGTSESATPESGPGTSESATPESGPGSEPATSGSETPGSEPATSGSETPGSPAGSPTSTEEGTSTEPSEGSAPGTSTEPSEGSAPGSEPATSGSETPGTSESATPESGPGTSTEPSEGSAPASSEQKLISEEDLSPATGHHHHHH

SEQ ID NO: 1164 - DNA, 7062 bp, synthetic construct
  misc_feature 1..7062: note = Description of Artificial Sequence: Synthetic polynucleotide
  source 1..7062: mol_type = other DNA
gccaccagaagatactacctgggtgcagtggaactgtcatgggactatatgcaaggcgcgccaggctccagcccctccgcgagcacgggaaccggaccaggttcgtcaccctcagcatcaacggggacgggaccgggggcgtcaccaggaacgtcctccaccggctcgccgggtgcatcacccggaacgtcatcgaccggatcgccagggagctcgacgccatcaggcgcaacaggatcacctggctcaagccctagcgcgtcaaccggcacgggtccgggtgcctcccctggcacgtccagcaccggatcacccggatcgagcccatccgcctcaaccggaaccggacccggtacaccagggtcgggaacagcctcctcgtcaccaggctcctcaaccccctcgggagccacgggttcgcccggttcgtcaacgccttccggagcaactggtagccccggagcatcgccaggaacttcgagcacggggtcgcccgcctcgagcagtgatctcggtgagctgcctgtggacgcaagatttcctcctagagtgccaaaatcttttccattcaacacctcagtcgtgtacaaaaagactctgtttgtagaattcacggatcaccttttcaacatcgctaagccaaggccaccctggatgggtctgctaggtcctaccatccaggctgaggtttatgatacagtggtcattacacttaagaacatggcttcccatcctgtcagtcttcatgctgttggtgtatcctactggaaagcttctgagggagctgaatatgatgatcagaccagtcaaagggagaaagaagatgataaagtcttccctggtggaagccatacatatgtctggcaggtcctgaaagagaatggtccaatggcctctgacccactgtgccttacctactcatatctttctcatgtggacctggtaaaagacttgaattcaggcctcattggagccctactagtatgtagagaagggagtctggccaaggaaaagacacagaccttgcacaaatttatactactttttgctgtatttgatgaagggaaaagttggcactcagaaacaaagaactccttgatgcaggatagggatgctgcatctgctcgggcctggcctaaaatgcacacagtcaatggttatgtaaacaggtctctgccaggtctgattggatgccacaggaaatcagtctattggcatgtgattggaatgggcaccactcctgaagtgcactcaatattcctcgaaggtcacacatttcttgtgaggaaccatcgccaggctagcttggaaatctcgccaataactttccttactgctcaaacactcttgatggaccttggacagtttctactgttttgtcatatctcttcccaccaacatgatggcatggaagcttatgtcaaagtagacagctgtccagaggaaccccaactacgaatgaaaaataatgaagaagcggaagactatgatgatgatcttactgattctgaaatggatgtggtcaggtttgatgatgacaactctccttcctttatccaaattcgctcagttgccaagaagcatcctaaaacttgggtacattacattgctgctgaagaggaggactgggactatgctcccttagtcctcgcccccgatggcgcgccaaccagtacggagccgtccgaggggagcgcaccaggaagcccggctgggagcccgacttctaccgaagagggtacatctaccgaaccaagtgaaggttcagcaccaggcacctcaacagaaccctctgagggctcggcgcctggtacaagtgagtccgccaccccagaatccgggcctgggacaagcacagaaccttcggaagggagtgcccctggaacatccgaatcggcaaccccagaatcagggccaggatctgagcccgcgacttcgggctccgagacgcctgggacatccaccgagccctccgaaggatcagccccaggcaccagcacggagccctctgagggaagcgcacctggtaccagcgaaagcgcaactcccgaatcaggtcccggtacgagcgagtcggcgaccccggagagcgggccaggtgcctcgagcgacagaagttataaaagtcaatatttgaacaatggccctcagcggattggtaggaagtacaaaaaagtccgatttatggcatacacagatgaaacctttaagactcgtgaagctattcagcatgaatcaggaatcttgggacctttactttatggggaagttggagacacactgttgattatatttaagaatcaagcaagcagaccatataacatctaccctcacggaatcactgatgtccgtcctttgtattcaaggagattaccaaaaggtgtaaaacatttgaaggattttccaattctgccaggagaaatattcaaatataaatggacagtgactgtagaagatgggccaactaaatcagatcctcggtgcctgacccgctattactctagtttcgttaatatggagagagatctagcttcaggactcattggccctctcctcatctgctacaaagaatctgtagatcaaagaggaaaccagataatgtcagacaagaggaatgtcatcctgttttctgtatttgatgagaaccgaagctggtacctcacagagaatatacaacgctttctccccaatccagctggagtgcagcttgaggatccagagttccaagcctccaacatcatgcacagcatcaatggctatgtttttgatagtttgcagttgtcagtttgtttgcatgaggtggcatactggtacattctaagcattggagcacagactgacttcctttctgtcttcttctctggatataccttcaaacacaaaatggtctatgaagacacactcaccctattcccattctcaggagaaactgtcttcatgtcgatggaaaacccaggtctatggattctggggtgccacaactcagactttcggaacagaggcatgaccgccttactgaaggtttctagttgtgacaagaacactggtgattattacgaggacagttatgaagatatttcagcatacttgctgagtaaaaacaatgccattgaaccaagaagcttctctcaaaacccaccagtcttgaaacgccatcaacgggaaataactcgtactactcttcagggcgcgccaggtacacccggatcgggtacagcgtcatcgagccccggtgcgtcacctggtacgtcgagcacggggtcgccaggggcgtcccctgggacgtcctcaacaggctcgcccggtgcgtcacccggcacgtcgtccacgggttcacctggtagctccccttccgcgtccactggcaccgggcctggaactccggggagcggcacagcgagctcgtcgccgggagcatcgcctgggacatcgagcaccgggtcgccaggagcatcgcccggaacatccagcacaggaagccccggcgcgtcgcccgggacatcaagcacaggttccccgggatcgagcacgccgtccggagccactggatcaccagggagctcgacaccttccggcgcaacgggatcgcccggagccagcccgggtacgtcaagcactggctcccctgcctcgagctcagatcaagaggaaatcgattatgatgataccatatcagttgaaatgaagaaggaagattttgacatttatgatgaggatgaaaatcagagcccccgcagctttcaaaagaaaacacgacactattttattgctgcagtggagaggctctgggattatgggatgagtagctccccacatgttctaagaaacagggctcagagtggcagtgtccctcagttcaagaaagttgttttccaggaatttactgatggctcctttactcagcccttataccgtggagaactaaatgaacatttgggactcctggggccatatataagagcagaagttgaagataatatcatggtaactttcagaaatcaggcctctcgtccctattccttctattctagccttatttcttatgaggaagatcagaggcaaggagcagaacctagaaaaaactttgtcaagcctaatgaaaccaaaacttacttttggaaagtgcaacatcatatggcacccactaaagatgagtttgactgcaaagcctgggcttatttctctgatgttgacctggaaaaagatgtgcactcaggcctgattggaccccttctggtctgccacactaacacactgaaccctgctcatgggagacaagtgacagtacaggaatttgctctgtttttcaccatctttgatgagaccaaaagctggtacttcactgaaaatatggaaagaaactgcaggggcgcgccaacgtccgaaagtgctacccctgagtcaggccctggtagtgagcctgccacaagcggaagcgaaactccggggacctcagagtctgccactcccgaatcggggccaggctctgaaccggccacttcagggagcgaaacaccaggaacatcggagagcgctaccccggagagcgggccaggaactagtactgagcctagcgagggaagtgcacctggtacaagcgagtccgccacacccgagtctggccctggctctccagcgggctcacccacgagcactgaagagggctctcccgctggcagcccaacgtcgacagaagaaggatcaccagcaggctcccccacatcaacagaggagggtacatcagaatctgctactcccgagagtggacccggtacctccactgagcccagcgaggggagtgcaccaggtgcctcgagcgctccctgcaatatccagatggaagatcccacttttaaagagaattatcgcttccatgcaatcaatggctacataatggatacactacctggcttagtaatggctcaggatcaaaggattcgatggtatctgctcagcatgggcagcaatgaaaacatccattctattcatttcagtggacatgtgttcactgtacgaaaaaaagaggagtataaaatggcactgtacaatctctatccaggtgtttttgagacagtggaaatgttaccatccaaagctggaatttggcgggtggaatgccttattggcgagcatctacatgctgggatgagcacactttttctggtgtacagcaataagtgtcagactcccctgggaatggcttctggacacattagagattttcagattacagcttcaggacaatatggacagtgggccccaaagctggccagacttcattattccggatcaatcaatgcctggagcaccaaggagcccttttcttggatcaaggtggatctgttggcaccaatgattattcacggcatcaagacccagggtgcccgtcagaagttctccagcctctacatctctcagtttatcatcatgtatagtcttgatgggaagaagtggcagacttatcgaggaaattccactggaaccttaatggtcttctttggcaatgtggattcatctgggataaaacacaatatttttaaccctccaattattgctcgatacatccgtttgcacccaactcattatagcattcgcagcactcttcgcatggagttgatgggctgtgatttaaatagttgcagcatgccattgggaatggagagtaaagcaatatcagatgcacagattactgcttcatcctactttaccaatatgtttgccacctggtctccttcaaaagctcgacttcacctccaagggaggagtaatgcctggagacctcaggtgaataatccaaaagagtggctgcaagtggacttccagaagacaatgaaagtcacaggagtaactactcagggagtaaaatctctgcttaccagcatgtatgtgaaggagttcctcatctccagcagtcaagatggccatcagtggactctcttttttcagaatggcaaagtaaaggtttttcagggaaatcaagactccttcacacctgtggtgaactctctagacccaccgttactgactcgctaccttcgaattcacccccagagttgggtgcaccagattgccctgaggatggaggttctgggctgcgaggcacaggacctctacggcgcgccaggtacctcagagtctgctacccccgagtcagggccaggatcagagccagccacctccgggtctgagacacccgggacttccgagagtgccacccctgagtccggacccgggtccgagcccgccacttccggctccgaaactcccggcacaagcgagagcgctaccccagagtcaggaccaggaacatctacagagccctctgaaggctccgctccagggtccccagccggcagtcccactagcaccgaggagggaacctctgaaagcgccacacccgaatcagggccagggtctgagcctgctaccagcggcagcgagacaccaggcacctctgagtccgccacaccagagtccggacccggatctcccgctgggagccccacctccactgaggagggatctcctgctggctctccaacatctactgaggaaggtacctcaaccgagccatccgagggatcagctcccggcacctcagagtcggcaaccccggagtctggacccggaacttccgaaagtgccacaccagagtccggtcccgggacttcagaatcagcaacacccgagtccggccctgggtctgaacccgccacaagtggtagtgagacaccaggatcagaacctgctacctcagggtcagagacacccggatctccggcaggctcaccaacctccactgaggagggcaccagcacagaaccaagcgagggctccgcacccggaacaagcactgaacccagtgagggttcagcacccggctctgagccggccacaagtggcagtgagacacccggcacttcagagagtgccacccccgagagtggcccaggcactagtaccgagccctctgaaggcagtgcgccagcctcgagcgaacaaaaactcatctcagaagaggatctgtcacctgcaaccggtcatcatcaccatcaccattga

SEQ ID NO: 1165 - protein, 2356 aa, synthetic construct
  REGION 1..2356: note = Description of Artificial Sequence: Synthetic polypeptide
ATRRYYLGAVELSWDYMQGAPGSSPSASTGTGPGSSPSASTGTGPGASPGTSSTGSPGASPGTSSTGSPGSSTPSGATGSPGSSPSASTGTGPGASPGTSSTGSPGSSPSASTGTGPGTPGSGTASSSPGSSTPSGATGSPGSSTPSGATGSPGASPGTSSTGSPASSSDLGELPVDARFPPRVPKSFPFNTSVVYKKTLFVEFTDHLFNIAKPRPPWMGLLGPTIQAEVYDTVVITLKNMASHPVSLHAVGVSYWKASEGAEYDDQTSQREKEDDKVFPGGSHTYVWQVLKENGPMASDPLCLTYSYLSHVDLVKDLNSGLIGALLVCREGSLAKEKTQTLHKFILLFAVFDEGKSWHSETKNSLMQDRDAASARAWPKMHTVNGYVNRSLPGLIGCHRKSVYWHVIGMGTTPEVHSIFLEGHTFLVRNHRQASLEISPITFLTAQTLLMDLGQFLLFCHISSHQHDGMEAYVKVDSCPEEPQLRMKNNEEAEDYDDDLTDSEMDVVRFDDDNSPSFIQIRSVAKKHPKTWVHYIAAEEEDWDYAPLVLAPDGAPTSTEPSEGSAPGSPAGSPTSTEEGTSTEPSEGSAPGTSTEPSEGSAPGTSESATPESGPGTSTEPSEGSAPGTSESATPESGPGSEPATSGSETPGTSTEPSEGSAPGTSTEPSEGSAPGTSESATPESGPGTSESATPESGPGASSDRSYKSQYLNNGPQRIGRKYKKVRFMAYTDETFKTREAIQHESGILGPLLYGEVGDTLLIIFKNQASRPYNIYPHGITDVRPLYSRRLPKGVKHLKDFPILPGEIFKYKWTVTVEDGPTKSDPRCLTRYYSSFVNMERDLASGLIGPLLICYKESVDQRGNQIMSDKRNVILFSVFDENRSWYLTENIQRFLPNPAGVQLEDPEFQASNIMHSINGYVFDSLQLSVCLHEVAYWYILSIGAQTDFLSVFFSGYTFKHKMVYEDTLTLFPFSGETVFMSMENPGLWILGCHNSDFRNRGMTALLKVSSCDKNTGDYYEDSYEDISAYLLSKNNAIEPRSFSQNPPVLKRHQREITRTTLQSDQEEIDYDDTISVEMKKEDFDIYDEDENQSPRSFQKKTRHYFIAAVERLWDYGMSSSPHVLRNRAQGAPGTPGSGTASSSPGASPGTSSTGSPGASPGTSSTGSPGASPGTSSTGSPGSSPSASTGTGPGTPGSGTASSSPGASPGTSSTGSPGASPGTSSTGSPGASPGTSSTGSPGSSTPSGATGSPGSSTPSGATGSPGASPGTSSTGSPASSRAQSGSVPQFKKVVFQEFTDGSFTQPLYRGELNEHLGLLGPYIRAEVEDNIMVTFRNQASRPYSFYSSLISYEEDQRQGAEPRKNFVKPNETKTYFWKVQHHMAPTKDEFDCKAWAYFSDVDLEKDVHSGLIGPLLVCHTNTLNPAHGRQVTVQEFALFFTIFDETKSWYFTENMERNCRGAPTSESATPESGPGSEPATSGSETPGTSESATPESGPGSEPATSGSETPGTSESATPESGPGTSTEPSEGSAPGTSESATPESGPGSPAGSPTSTEEGSPAGSPTSTEEGSPAGSPTSTEEGTSESATPESGPGTSTEPSEGSAPGASSAPCNIQMEDPTFKENYRFHAINGYIMDTLPGLVMAQDQRIRWYLLSMGSNENIHSIHFSGHVFTVRKKEEYKMALYNLYPGVFETVEMLPSKAGIWRVECLIGEHLHAGMSTLFLVYSNKCQTPLGMASGHIRDFQITASGQYGQWAPKLARLHYSGSINAWSTKEPFSWIKVDLLAPMIIHGIKTQGARQKFSSLYISQFIIMYSLDGKKWQTYRGNSTGTLMVFFGNVDSSGIKHNIFNPPIIARYIRLHPTHYSIRSTLRMELMGCDLNSCSMPLGMESKAISDAQITASSYFTNMFATWSPSKARLHLQGRSNAWRPQVNNPKEWLQVDFQKTMKVTGVTTQGVKSLLTSMYVKEFLISSSQDGHQWTLFFQNGKVKVFQGNQDSFTPVVNSLDPPLLTRYLRIHPQSWVHQIALRMEVLGCEAQDLYGAPGTSESATPESGPGSEPATSGSETPGTSESATPESGPGSEPATSGSETPGTSESATPESGPGTSTEPSEGSAPGSPAGSPTSTEEGTSESATPESGPGSEPATSGSETPGTSESATPESGPGSPAGSPTSTEEGSPAGSPTSTEEGTSTEPSEGSAPGTSESATPESGPGTSESATPESGPGTSESATPESGPGSEPATSGSETPGSEPATSGSETPGSPAGSPTSTEEGTSTEPSEGSAPGTSTEPSEGSAPGSEPATSGSETPGTSESATPESGPGTSTEPSEGSAPASSEQKLISEEDLSPATGHHHHHH

SEQ ID NO: 1166 - DNA, 7071 bp, synthetic construct
  misc_feature 1..7071: note = Description of Artificial Sequence: Synthetic polynucleotide
  source 1..7071: mol_type = other DNA
gccaccagaagatactacctgggtgcagtggaactgtcatgggactatatgcaaggcgcgccaggctccagcccctccgcgagcacgggaaccggaccaggttcgtcaccctcagcatcaacggggacgggaccgggggcgtcaccaggaacgtcctccaccggctcgccgggtgcatcacccggaacgtcatcgaccggatcgccagggagctcgacgccatcaggcgcaacaggatcacctggctcaagccctagcgcgtcaaccggcacgggtccgggtgcctcccctggcacgtccagcaccggatcacccggatcgagcccatccgcctcaaccggaaccggacccggtacaccagggtcgggaacagcctcctcgtcaccaggctcctcaaccccctcgggagccacgggttcgcccggttcgtcaacgccttccggagcaactggtagccccggagcatcgccaggaacttcgagcacggggtcgcccgcctcgagcagtgatctcggtgagctgcctgtggacgcaagatttcctcctagagtgccaaaatcttttccattcaacacctcagtcgtgtacaaaaagactctgtttgtagaattcacggatcaccttttcaacatcgctaagccaaggccaccctggatgggtctgctaggtcctaccatccaggctgaggtttatgatacagtggtcattacacttaagaacatggcttcccatcctgtcagtcttcatgctgttggtgtatcctactggaaagcttctgagggagctgaatatgatgatcagaccagtcaaagggagaaagaagatgataaagtcttccctggtggaagccatacatatgtctggcaggtcctgaaagagaatggtccaatggcctctgacccactgtgccttacctactcatatctttctcatgtggacctggtaaaagacttgaattcaggcctcattggagccctactagtatgtagagaagggagtctggccaaggaaaagacacagaccttgcacaaatttatactactttttgctgtatttgatgaagggaaaagttggcactcagaaacaaagaactccttgatgcaggatagggatgctgcatctgctcgggcctggcctaaaatgcacacagtcaatggttatgtaaacaggtctctgccaggtctgattggatgccacaggaaatcagtctattggcatgtgattggaatgggcaccactcctgaagtgcactcaatattcctcgaaggtcacacatttcttgtgaggaaccatcgccaggctagcttggaaatctcgccaataactttccttactgctcaaacactcttgatggaccttggacagtttctactgttttgtcatatctcttcccaccaacatgatggcatggaagcttatgtcaaagtagacagctgtccagaggaaccccaactacgaatgaaaaataatgaagaagcggaagactatgatgatgatcttactgattctgaaatggatgtggtcaggtttgatgatgacaactctccttcctttatccaaattcgctcagttgccaagaagcatcctaaaacttgggtacattacattgctgctgaagaggaggactgggactatgctcccttagtcctcgcccccgatggcgcgccaaccagtacggagccgtccgaggggagcgcaccaggaagcccggctgggagcccgacttctaccgaagagggtacatctaccgaaccaagtgaaggttcagcaccaggcacctcaacagaaccctctgagggctcggcgcctggtacaagtgagtccgccaccccagaatccgggcctgggacaagcacagaaccttcggaagggagtgcccctggaacatccgaatcggcaaccccagaatcagggccaggatctgagcccgcgacttcgggctccgagacgcctgggacatccaccgagccctccgaaggatcagccccaggcaccagcacggagccctctgagggaagcgcacctggtaccagcgaaagcgcaactcccgaatcaggtcccggtacgagcgagtcggcgaccccggagagcgggccaggtgcctcgagcgacagaagttataaaagtcaatatttgaacaatggccctcagcggattggtaggaagtacaaaaaagtccgatttatggcatacacagatgaaacctttaagactcgtgaagctattcagcatgaatcaggaatcttgggacctttactttatggggaagttggagacacactgttgattatatttaagaatcaagcaagcagaccatataacatctaccctcacggaatcactgatgtccgtcctttgtattcaaggagattaccaaaaggtgtaaaacatttgaaggattttccaattctgccaggagaaatattcaaatataaatggacagtgactgtagaagatgggccaactaaatcagatcctcggtgcctgacccgctattactctagtttcgttaatatggagagagatctagcttcaggactcattggccctctcctcatctgctacaaagaatctgtagatcaaagaggaaaccagataatgtcagacaagaggaatgtcatcctgttttctgtatttgatgagaaccgaagctggtacctcacagagaatatacaacgctttctccccaatccagctggagtgcagcttgaggatccagagttccaagcctccaacatcatgcacagcatcaatggctatgtttttgatagtttgcagttgtcagtttgtttgcatgaggtggcatactggtacattctaagcattggagcacagactgacttcctttctgtcttcttctctggatataccttcaaacacaaaatggtctatgaagacacactcaccctattcccattctcaggagaaactgtcttcatgtcgatggaaaacccaggtctatggattctggggtgccacaactcagactttcggaacagaggcatgaccgccttactgaaggtttctagttgtgacaagaacactggtgattattacgaggacagttatgaagatatttcagcatacttgctgagtaaaaacaatgccattgaaccaagaagcttctctcaaaacccaccagtcttgaaacgccatcaacgggaaataactcgtactactcttcagtcagatcaagaggaaatcgattatgatgataccatatcagttgaaatgaagaaggaagattttgacatttatgatgaggatgaaaatcagagcccccgcagctttcaaaagaaaacacgacactattttattgctgcagtggagaggctctgggattatgggatgagtagctccccacatgttctaagaaacagggctcagggcgcgccaggtacacccggatcgggtacagcgtcatcgagccccggtgcgtcacctggtacgtcgagcacggggtcgccaggggcgtcccctgggacgtcctcaacaggctcgcccggtgcgtcacccggcacgtcgtccacgggttcacctggtagctccccttccgcgtccactggcaccgggcctggaactccggggagcggcacagcgagctcgtcgccgggagcatcgcctgggacatcgagcaccgggtcgccaggagcatcgcccggaacatccagcacaggaagccccggcgcgtcgcccgggacatcaagcacaggttccccgggatcgagcacgccgtccggagccactggatcaccagggagctcgacaccttccggcgcaacgggatcgcccggagccagcccgggtacgtcaagcactggctcccctgcctcgagcagggctcagagtggcagtgtccctcagttcaagaaagttgttttccaggaatttactgatggctcctttactcagcccttataccgtggagaactaaatgaacatttgggactcctggggccatatataagagcagaagttgaagataatatcatggtaactttcagaaatcaggcctctcgtccctattccttctattctagccttatttcttatgaggaagatcagaggcaaggagcagaacctagaaaaaactttgtcaagcctaatgaaaccaaaacttacttttggaaagtgcaacatcatatggcacccactaaagatgagtttgactgcaaagcctgggcttatttctctgatgttgacctggaaaaagatgtgcactcaggcctgattggaccccttctggtctgccacactaacacactgaaccctgctcatgggagacaagtgacagtacaggaatttgctctgtttttcaccatctttgatgagaccaaaagctggtacttcactgaaaatatggaaagaaactgcaggggcgcgccaacgtccgaaagtgctacccctgagtcaggccctggtagtgagcctgccacaagcggaagcgaaactccggggacctcagagtctgccactcccgaatcggggccaggctctgaaccggccacttcagggagcgaaacaccaggaacatcggagagcgctaccccggagagcgggccaggaactagtactgagcctagcgagggaagtgcacctggtacaagcgagtccgccacacccgagtctggccctggctctccagcgggctcacccacgagcactgaagagggctctcccgctggcagcccaacgtcgacagaagaaggatcaccagcaggctcccccacatcaacagaggagggtacatcagaatctgctactcccgagagtggacccggtacctccactgagcccagcgaggggagtgcaccaggtgcctcgagcgctccctgcaatatccagatggaagatcccacttttaaagagaattatcgcttccatgcaatcaatggctacataatggatacactacctggcttagtaatggctcaggatcaaaggattcgatggtatctgctcagcatgggcagcaatgaaaacatccattctattcatttcagtggacatgtgttcactgtacgaaaaaaagaggagtataaaatggcactgtacaatctctatccaggtgtttttgagacagtggaaatgttaccatccaaagctggaatttggcgggtggaatgccttattggcgagcatctacatgctgggatgagcacactttttctggtgtacagcaataagtgtcagactcccctgggaatggcttctggacacattagagattttcagattacagcttcaggacaatatggacagtgggccccaaagctggccagacttcattattccggatcaatcaatgcctggagcaccaaggagcccttttcttggatcaaggtggatctgttggcaccaatgattattcacggcatcaagacccagggtgcccgtcagaagttctccagcctctacatctctcagtttatcatcatgtatagtcttgatgggaagaagtggcagacttatcgaggaaattccactggaaccttaatggtcttctttggcaatgtggattcatctgggataaaacacaatatttttaaccctccaattattgctcgatacatccgtttgcacccaactcattatagcattcgcagcactcttcgcatggagttgatgggctgtgatttaaatagttgcagcatgccattgggaatggagagtaaagcaatatcagatgcacagattactgcttcatcctactttaccaatatgtttgccacctggtctccttcaaaagctcgacttcacctccaagggaggagtaatgcctggagacctcaggtgaataatccaaaagagtggctgcaagtggacttccagaagacaatgaaagtcacaggagtaactactcagggagtaaaatctctgcttaccagcatgtatgtgaaggagttcctcatctccagcagtcaagatggccatcagtggactctcttttttcagaatggcaaagtaaaggtttttcagggaaatcaagactccttcacacctgtggtgaactctctagacccaccgttactgactcgctaccttcgaattcacccccagagttgggtgcaccagattgccctgaggatggaggttctgggctgcgaggcacaggacctctacggcgcgccaggtacctcagagtctgctacccccgagtcagggccaggatcagagccagccacctccgggtctgagacacccgggacttccgagagtgccacccctgagtccggacccgggtccgagcccgccacttccggctccgaaactcccggcacaagcgagagcgctaccccagagtcaggaccaggaacatctacagagccctctgaaggctccgctccagggtccccagccggcagtcccactagcaccgaggagggaacctctgaaagcgccacacccgaatcagggccagggtctgagcctgctaccagcggcagcgagacaccaggcacctctgagtccgccacaccagagtccggacccggatctcccgctgggagccccacctccactgaggagggatctcctgctggctctccaacatctactgaggaaggtacctcaaccgagccatccgagggatcagctcccggcacctcagagtcggcaaccccggagtctggacccggaacttccgaaagtgccacaccagagtccggtcccgggacttcagaatcagcaacacccgagtccggccctgggtctgaacccgccacaagtggtagtgagacaccaggatcagaacctgctacctcagggtcagagacacccggatctccggcaggctcaccaacctccactgaggagggcaccagcacagaaccaagcgagggctccgcacccggaacaagcactgaacccagtgagggttcagcacccggctctgagccggccacaagtggcagtgagacacccggcacttcagagagtgccacccccgagagtggcccaggcactagtaccgagccctctgaaggcagtgcgccagcctcgagcgaacaaaaactcatctcagaagaggatctgtcacctgcaaccggtcatcatcaccatcaccattga

SEQ ID NO: 1167 - protein, 2356 aa, synthetic construct
  REGION 1..2356: note = Description of Artificial Sequence: Synthetic polypeptide
ATRRYYLGAVELSWDYMQGAPGSSPSASTGTGPGSSPSASTGTGPGASPGTSSTGSPGASPGTSSTGSPGSSTPSGATGSPGSSPSASTGTGPGASPGTSSTGSPGSSPSASTGTGPGTPGSGTASSSPGSSTPSGATGSPGSSTPSGATGSPGASPGTSSTGSPASSSDLGELPVDARFPPRVPKSFPFNTSVVYKKTLFVEFTDHLFNIAKPRPPWMGLLGPTIQAEVYDTVVITLKNMASHPVSLHAVGVSYWKASEGAEYDDQTSQREKEDDKVFPGGSHTYVWQVLKENGPMASDPLCLTYSYLSHVDLVKDLNSGLIGALLVCREGSLAKEKTQTLHKFILLFAVFDEGKSWHSETKNSLMQDRDAASARAWPKMHTVNGYVNRSLPGLIGCHRKSVYWHVIGMGTTPEVHSIFLEGHTFLVRNHRQASLEISPITFLTAQTLLMDLGQFLLFCHISSHQHDGMEAYVKVDSCPEEPQLRMKNNEEAEDYDDDLTDSEMDVVRFDDDNSPSFIQIRSVAKKHPKTWVHYIAAEEEDWDYAPLVLAPDDRSYKSQYLNNGPQRIGRKYKKVRFMAYTDETFKTREAIQHESGILGPLLYGEVGDTLLIIFKNQASRPYNIYPHGITDVRPLYSRRLPKGVKHLKDFPILPGEIFKYKWTVTVEDGPTKSDPRCLTRYYSSFVNMERDLASGLIGPLLICYKESVDQRGNQIMSDKRNVILFSVFDENRSWYLTENIQRFLPNPAGVQLEDPEFQASNIMHSINGYVFDSLQLSVCLHEVAYWYILSIGAQTDFLSVFFSGYTFKHKMVYEDTLTLFPFSGETVFMSMENPGLWILGCHNSDFRNRGMTALLKVSSCDKNTGDYYEDSYEDISAYLLSKNNAIEPRSFSQNPPVLKRHQREITRTTLQGAPGTPGSGTASSSPGASPGTSSTGSPGASPGTSSTGSPGASPGTSSTGSPGSSPSASTGTGPGTPGSGTASSSPGASPGTSSTGSPGASPGTSSTGSPGASPGTSSTGSPGSSTPSGATGSPGSSTPSGATGSPGASPGTSSTGSPASSSDQEEIDYDDTISVEMKKEDFDIYDEDENQSPRSFQKKTRHYFIAAVERLWDYGMSSSPHVLRNRAQGAPGTPGSGTASSSPGASPGTSSTGSPGASPGTSSTGSPGASPGTSSTGSPGSSPSASTGTGPGTPGSGTASSSPGASPGTSSTGSPGASPGTSSTGSPGASPGTSSTGSPGSSTPSGATGSPGSSTPSGATGSPGASPGTSSTGSPASSRAQSGSVPQFKKVVFQEFTDGSFTQPLYRGELNEHLGLLGPYIRAEVEDNIMVTFRNQASRPYSFYSSLISYEEDQRQGAEPRKNFVKPNETKTYFWKVQHHMAPTKDEFDCKAWAYFSDVDLEKDVHSGLIGPLLVCHTNTLNPAHGRQVTVQEFALFFTIFDETKSWYFTENMERNCRGAPTSESATPESGPGSEPATSGSETPGTSESATPESGPGSEPATSGSETPGTSESATPESGPGTSTEPSEGSAPGTSESATPESGPGSPAGSPTSTEEGSPAGSPTSTEEGSPAGSPTSTEEGTSESATPESGPGTSTEPSEGSAPGASSAPCNIQMEDPTFKENYRFHAINGYIMDTLPGLVMAQDQRIRWYLLSMGSNENIHSIHFSGHVFTVRKKEEYKMALYNLYPGVFETVEMLPSKAGIWRVECLIGEHLHAGMSTLFLVYSNKCQTPLGMASGHIRDFQITASGQYGQWAPKLARLHYSGSINAWSTKEPFSWIKVDLLAPMIIHGIKTQGARQKFSSLYISQFIIMYSLDGKKWQTYRGNSTGTLMVFFGNVDSSGIKHNIFNPPIIARYIRLHPTHYSIRSTLRMELMGCDLNSCSMPLGMESKAISDAQITASSYFTNMFATWSPSKARLHLQGRSNAWRPQVNNPKEWLQVDFQKTMKVTGVTTQGVKSLLTSMYVKEFLISSSQDGHQWTLFFQNGKVKVFQGNQDSFTPVVNSLDPPLLTRYLRIHPQSWVHQIALRMEVLGCEAQDLYGAPGTSESATPESGPGSEPATSGSETPGTSESATPESGPGSEPATSGSETPGTSESATPESGPGTSTEPSEGSAPGSPAGSPTSTEEGTSESATPESGPGSEPATSGSETPGTSESATPESGPGSPAGSPTSTEEGSPAGSPTSTEEGTSTEPSEGSAPGTSESATPESGPGTSESATPESGPGTSESATPESGPGSEPATSGSETPGSEPATSGSETPGSPAGSPTSTEEGTSTEPSEGSAPGTSTEPSEGSAPGSEPATSGSETPGTSESATPESGPGTSTEPSEGSAPASSEQKLISEEDLSPATGHHHHHH

SEQ ID NO: 1168 - DNA, 7071 bp, synthetic construct
  misc_feature 1..7071: note = Description of Artificial Sequence: Synthetic polynucleotide
  source 1..7071: mol_type = other DNA
gccaccagaagatactacctgggtgcagtggaactgtcatgggactatatgcaaggcgcgccaggctccagcccctccgcgagcacgggaaccggaccaggttcgtcaccctcagcatcaacggggacgggaccgggggcgtcaccaggaacgtcctccaccggctcgccgggtgcatcacccggaacgtcatcgaccggatcgccagggagctcgacgccatcaggcgcaacaggatcacctggctcaagccctagcgcgtcaaccggcacgggtccgggtgcctcccctggcacgtccagcaccggatcacccggatcgagcccatccgcctcaaccggaaccggacccggtacaccagggtcgggaacagcctcctcgtcaccaggctcctcaaccccctcgggagccacgggttcgcccggttcgtcaacgccttccggagcaactggtagccccggagcatcgccaggaacttcgagcacggggtcgcccgcctcgagcagtgatctcggtgagctgcctgtggacgcaagatttcctcctagagtgccaaaatcttttccattcaacacctcagtcgtgtacaaaaagactctgtttgtagaattcacggatcaccttttcaacatcgctaagccaaggccaccctggatgggtctgctaggtcctaccatccaggctgaggtttatgatacagtggtcattacacttaagaacatggcttcccatcctgtcagtcttcatgctgttggtgtatcctactggaaagcttctgagggagctgaatatgatgatcagaccagtcaaagggagaaagaagatgataaagtcttccctggtggaagccatacatatgtctggcaggtcctgaaagagaatggtccaatggcctctgacccactgtgccttacctactcatatctttctcatgtggacctggtaaaagacttgaattcaggcctcattggagccctactagtatgtagagaagggagtctggccaaggaaaagacacagaccttgcacaaatttatactactttttgctgtatttgatgaagggaaaagttggcactcagaaacaaagaactccttgatgcaggatagggatgctgcatctgctcgggcctggcctaaaatgcacacagtcaatggttatgtaaacaggtctctgccaggtctgattggatgccacaggaaatcagtctattggcatgtgattggaatgggcaccactcctgaagtgcactcaatattcctcgaaggtcacacatttcttgtgaggaaccatcgccaggctagcttggaaatctcgccaataactttccttactgctcaaacactcttgatggaccttggacagtttctactgttttgtcatatctcttcccaccaacatgatggcatggaagcttatgtcaaagtagacagctgtccagaggaaccccaactacgaatgaaaaataatgaagaagcggaagactatgatgatgatcttactgattctgaaatggatgtggtcaggtttgatgatgacaactctccttcctttatccaaattcgctcagttgccaagaagcatcctaaaacttgggtacattacattgctgctgaagaggaggactgggactatgctcccttagtcctcgcccccgatgacagaagttataaaagtcaatatttgaacaatggccctcagcggattggtaggaagtacaaaaaagtccgatttatggcatacacagatgaaacctttaagactcgtgaagctattcagcatgaatcaggaatcttgggacctttactttatggggaagttggagacacactgttgattatatttaagaatcaagcaagcagaccatataacatctaccctcacggaatcactgatgtccgtcctttgtattcaaggagattaccaaaaggtgtaaaacatttgaaggattttccaattctgccaggagaaatattcaaatataaatggacagtgactgtagaagatgggccaactaaatcagatcctcggtgcctgacccgctattactctagtttcgttaatatggagagagatctagcttcaggactcattggccctctcctcatctgctacaaagaatctgtagatcaaagaggaaaccagataatgtcagacaagaggaatgtcatcctgttttctgtatttgatgagaaccgaagctggtacctcacagagaatatacaacgctttctccccaatccagctggagtgcagcttgaggatccagagttccaagcctccaacatcatgcacagcatcaatggctatgtttttgatagtttgcagttgtcagtttgtttgcatgaggtggcatactggtacattctaagcattggagcacagactgacttcctttctgtcttcttctctggatataccttcaaacacaaaatggtctatgaagacacactcaccctattcccattctcaggagaaactgtcttcatgtcgatggaaaacccaggtctatggattctggggtgccacaactcagactttcggaacagaggcatgaccgccttactgaaggtttctagttgtgacaagaacactggtgattattacgaggacagttatgaagatatttcagcatacttgctgagtaaaaacaatgccattgaaccaagaagcttctctcaaaacccaccagtcttgaaacgccatcaacgggaaataactcgtactactcttcagggcgcgccaggtacacccggatcgggtacagcgtcatcgagccccggtgcgtcacctggtacgtcgagcacggggtcgccaggggcgtcccctgggacgtcctcaacaggctcgcccggtgcgtcacccggcacgtcgtccacgggttcacctggtagctccccttccgcgtccactggcaccgggcctggaactccggggagcggcacagcgagctcgtcgccgggagcatcgcctgggacatcgagcaccgggtcgccaggagcatcgcccggaacatccagcacaggaagccccggcgcgtcgcccgggacatcaagcacaggttccccgggatcgagcacgccgtccggagccactggatcaccagggagctcgacaccttccggcgcaacgggatcgcccggagccagcccgggtacgtcaagcactggctcccctgcctcgagctcagatcaagaggaaatcgattatgatgataccatatcagttgaaatgaagaaggaagattttgacatttatgatgaggatgaaaatcagagcccccgcagctttcaaaagaaaacacgacactattttattgctgcagtggagaggctctgggattatgggatgagtagctccccacatgttctaagaaacagggctcagggcgcgccaggtacacccggatcgggtacagcgtcatcgagccccggtgcgtcacctggtacgtcgagcacggggtcgccaggggcgtcccctgggacgtcctcaacaggctcgcccggtgcgtcacccggcacgtcgtccacgggttcacctggtagctccccttccgcgtccactggcaccgggcctggaactccggggagcggcacagcgagctcgtcgccgggagcatcgcctgggacatcgagcaccgggtcgccaggagcatcgcccggaacatccagcacaggaagccccggcgcgtcgcccgggacatcaagcacaggttccccgggatcgagcacgccgtccggagccactggatcaccagggagctcgacaccttccggcgcaacgggatcgcccggagccagcccgggtacgtcaagcactggctcccctgcctcgagcagggctcagagtggcagtgtccctcagttcaagaaagttgttttccaggaatttactgatggctcctttactcagcccttataccgtggagaactaaatgaacatttgggactcctggggccatatataagagcagaagttgaagataatatcatggtaactttcagaaatcaggcctctcgtccctattccttctattctagccttatttcttatgaggaagatcagaggcaaggagcagaacctagaaaaaactttgtcaagcctaatgaaaccaaaacttacttttggaaagtgcaacatcatatggcacccactaaagatgagtttgactgcaaagcctgggcttatttctctgatgttgacctggaaaaagatgtgcactcaggcctgattggaccccttctggtctgccacactaacacactgaaccctgctcatgggagacaagtgacagtacaggaatttgctctgtttttcaccatctttgatgagaccaaaagctggtacttcactgaaaatatggaaagaaactgcaggggcgcgccaacgtccgaaagtgctacccctgagtcaggccctggtagtgagcctgccacaagcggaagcgaaactccggggacctcagagtctgccactcccgaatcggggccaggctctgaaccggccacttcagggagcgaaacaccaggaacatcggagagcgctaccccggagagcgggccaggaactagtactgagcctagcgagggaagtgcacctggtacaagcgagtccgccacacccgagtctggccctggctctccagcgggctcacccacgagcactgaagagggctctcccgctggcagcccaacgtcgacagaagaaggatcaccagcaggctcccccacatcaacagaggagggtacatcagaatctgctactcccgagagtggacccggtacctccactgagcccagcgaggggagtgcaccaggtgcctcgagcgctccctgcaatatccagatggaagatcccacttttaaagagaattatcgcttccatgcaatcaatggctacataatggatacactacctggcttagtaatggctcaggatcaaaggattcgatggtatctgctcagcatgggcagcaatgaaaacatccattctattcatttcagtggacatgtgttcactgtacgaaaaaaagaggagtataaaatggcactgtacaatctctatccaggtgtttttgagacagtggaaatgttaccatccaaagctggaatttggcgggtggaatgccttattggcgagcatctacatgctgggatgagcacactttttctggtgtacagcaataagtgtcagactcccctgggaatggcttctggacacattagagattttcagattacagcttcaggacaatatggacagtgggccccaaagctggccagacttcattattccggatcaatcaatgcctggagcaccaaggagcccttttcttggatcaaggtggatctgttggcaccaatgattattcacggcatcaagacccagggtgcccgtcagaagttctccagcctctacatctctcagtttatcatcatgtatagtcttgatgggaagaagtggcagacttatcgaggaaattccactggaaccttaatggtcttctttggcaatgtggattcatctgggataaaacacaatatttttaaccctccaattattgctcgatacatccgtttgcacccaactcattatagcattcgcagcactcttcgcatggagttgatgggctgtgatttaaatagttgcagcatgccattgggaatggagagtaaagcaatatcagatgcacagattactgcttcatcctactttaccaatatgtttgccacctggtctccttcaaaagctcgacttcacctccaagggaggagtaatgcctggagacctcaggtgaataatccaaaagagtggctgcaagtggacttccagaagacaatgaaagtcacaggagtaactactcagggagtaaaatctctgcttaccagcatgtatgtgaaggagttcctcatctccagcagtcaagatggccatcagtggactctcttttttcagaatggcaaagtaaaggtttttcagggaaatcaagactccttcacacctgtggtgaactctctagacccaccgttactgactcgctaccttcgaattcacccccagagttgggtgcaccagattgccctgaggatggaggttctgggctgcgaggcacaggacctctacggcgcgccaggtacctcagagtctgctacccccgagtcagggccaggatcagagccagccacctccgggtctgagacacccgggacttccgagagtgccacccctgagtccggacccgggtccgagcccgccacttccggctccgaaactcccggcacaagcgagagcgctaccccagagtcaggaccaggaacatctacagagccctctgaaggctccgctccagggtccccagccggcagtcccactagcaccgaggagggaacctctgaaagcgccacacccgaatcagggccagggtctgagcctgctaccagcggcagcgagacaccaggcacctctgagtccgccacaccagagtccggacccggatctcccgctgggagccccacctccactgaggagggatctcctgctggctctccaacatctactgaggaaggtacctcaaccgagccatccgagggatcagctcccggcacctcagagtcggcaaccccggagtctggacccggaacttccgaaagtgccacaccagagtccggtcccgggacttcagaatcagcaacacccgagtccggccctgggtctgaacccgccacaagtggtagtgagacaccaggatcagaacctgctacctcagggtcagagacacccggatctccggcaggctcaccaacctccactgaggagggcaccagcacagaaccaagcgagggctccgcacccggaacaagcactgaacccagtgagggttcagcacccggctctgagccggccacaagtggcagtgagacacccggcacttcagagagtgccacccccgagagtggcccaggcactagtaccgagccctctgaaggcagtgcgccagcctcgagcgaacaaaaactcatctcagaagaggatctgtcacctgcaaccggtcatcatcaccatcaccattga

SEQ ID NO: 1169 - protein, 2506 aa, synthetic construct
  REGION 1..2506: note = Description of Artificial Sequence: Synthetic polypeptide
ATRRYYLGAVELSWDYMQGAPGSSPSASTGTGPGSSPSASTGTGPGASPGTSSTGSPGASPGTSSTGSPGSSTPSGATGSPGSSPSASTGTGPGASPGTSSTGSPGSSPSASTGTGPGTPGSGTASSSPGSSTPSGATGSPGSSTPSGATGSPGASPGTSSTGSPASSSDLGELPVDARFPPRVPKSFPFNTSVVYKKTLFVEFTDHLFNIAKPRPPWMGLLGPTIQAEVYDTVVITLKNMASHPVSLHAVGVSYWKASEGAEYDDQTSQREKEDDKVFPGGSHTYVWQVLKENGPMASDPLCLTYSYLSHVDLVKDLNSGLIGALLVCREGSLAKEKTQTLHKFILLFAVFDEGKSWHSETKNSLMQDRDAASARAWPKMHTVNGYVNRSLPGLIGCHRKSVYWHVIGMGTTPEVHSIFLEGHTFLVRNHRQASLEISPITFLTAQTLLMDLGQFLLFCHISSHQHDGMEAYVKVDSCPEEPQLRMKNNEEAEDYDDDLTDSEMDVVRFDDDNSPSFIQIRSVAKKHPKTWVHYIAAEEEDWDYAPLVLAPDGAPTSTEPSEGSAPGSPAGSPTSTEEGTSTEPSEGSAPGTSTEPSEGSAPGTSESATPESGPGTSTEPSEGSAPGTSESATPESGPGSEPATSGSETPGTSTEPSEGSAPGTSTEPSEGSAPGTSESATPESGPGTSESATPESGPGASSDRSYKSQYLNNGPQRIGRKYKKVRFMAYTDETFKTREAIQHESGILGPLLYGEVGDTLLIIFKNQASRPYNIYPHGITDVRPLYSRRLPKGVKHLKDFPILPGEIFKYKWTVTVEDGPTKSDPRCLTRYYSSFVNMERDLASGLIGPLLICYKESVDQRGNQIMSDKRNVILFSVFDENRSWYLTENIQRFLPNPAGVQLEDPEFQASNIMHSINGYVFDSLQLSVCLHEVAYWYILSIGAQTDFLSVFFSGYTFKHKMVYEDTLTLFPFSGETVFMSMENPGLWILGCHNSDFRNRGMTALLKVSSCDKNTGDYYEDSYEDISAYLLSKNNAIEPRSFSQNPPVLKRHQREITRTTLQGAPGTPGSGTASSSPGASPGTSSTGSPGASPGTSSTGSPGASPGTSSTGSPGSSPSASTGTGPGTPGSGTASSSPGASPGTSSTGSPGASPGTSSTGSPGASPGTSSTGSPGSSTPSGATGSPGSSTPSGATGSPGASPGTSSTGSPASSSDQEEIDYDDTISVEMKKEDFDIYDEDENQSPRSFQKKTRHYFIAAVERLWDYGMSSSPHVLRNRAQGAPGTPGSGTASSSPGASPGTSSTGSPGASPGTSSTGSPGASPGTSSTGSPGSSPSASTGTGPGTPGSGTASSSPGASPGTSSTGSPGASPGTSSTGSPGASPGTSSTGSPGSSTPSGATGSPGSSTPSGATGSPGASPGTSSTGSPASSRAQSGSVPQFKKVVFQEFTDGSFTQPLYRGELNEHLGLLGPYIRAEVEDNIMVTFRNQASRPYSFYSSLISYEEDQRQGAEPRKNFVKPNETKTYFWKVQHHMAPTKDEFDCKAWAYFSDVDLEKDVHSGLIGPLLVCHTNTLNPAHGRQVTVQEFALFFTIFDETKSWYFTENMERNCRGAPTSESATPESGPGSEPATSGSETPGTSESATPESGPGSEPATSGSETPGTSESATPESGPGTSTEPSEGSAPGTSESATPESGPGSPAGSPTSTEEGSPAGSPTSTEEGSPAGSPTSTEEGTSESATPESGPGTSTEPSEGSAPGASSAPCNIQMEDPTFKENYRFHAINGYIMDTLPGLVMAQDQRIRWYLLSMGSNENIHSIHFSGHVFTVRKKEEYKMALYNLYPGVFETVEMLPSKAGIWRVECLIGEHLHAGMSTLFLVYSNKCQTPLGMASGHIRDFQITASGQYGQWAPKLARLHYSGSINAWSTKEPFSWIKVDLLAPMIIHGIKTQGARQKFSSLYISQFIIMYSLDGKKWQTYRGNSTGTLMVFFGNVDSSGIKHNIFNPPIIARYIRLHPTHYSIRSTLRMELMGCDLNSCSMPLGMESKAISDAQITASSYFTNMFATWSPSKARLHLQGRSNAWRPQVNNPKEWLQVDFQKTMKVTGVTTQGVKSLLTSMYVKEFLISSSQDGHQWTLFFQNGKVKVFQGNQDSFTPVVNSLDPPLLTRYLRIHPQSWVHQIALRMEVLGCEAQDLYGAPGTSESATPESGPGSEPATSGSETPGTSESATPESGPGSEPATSGSETPGTSESATPESGPGTSTEPSEGSAPGSPAGSPTSTEEGTSESATPESGPGSEPATSGSETPGTSESATPESGPGSPAGSPTSTEEGSPAGSPTSTEEGTSTEPSEGSAPGTSESATPESGPGTSESATPESGPGTSESATPESGPGSEPATSGSETPGSEPATSGSETPGSPAGSPTSTEEGTSTEPSEGSAPGTSTEPSEGSAPGSEPATSGSETPGTSESATPESGPGTSTEPSEGSAPASSEQKLISEEDLSPATGHHHHHH

SEQ ID NO: 1170 - DNA, 7521 bp, synthetic construct
  misc_feature 1..7521: note = Description of Artificial Sequence: Synthetic polynucleotide
  source 1..7521: mol_type = other DNA
gccaccagaagatactacctgggtgcagtggaactgtcatgggactatatgcaaggcgcgccaggctccagcccctccgcgagcacgggaaccggaccaggttcgtcaccctcagcatcaacggggacgggaccgggggcgtcaccaggaacgtcctccaccggctcgccgggtgcatcacccggaacgtcatcgaccggatcgccagggagctcgacgccatcaggcgcaacaggatcacctggctcaagccctagcgcgtcaaccggcacgggtccgggtgcctcccctggcacgtccagcaccggatcacccggatcgagcccatccgcctcaaccggaaccggacccggtacaccagggtcgggaacagcctcctcgtcaccaggctcctcaaccccctcgggagccacgggttcgcccggttcgtcaacgccttccggagcaactggtagccccggagcatcgccaggaacttcgagcacggggtcgcccgcctcgagcagtgatctcggtgagctgcctgtggacgcaagatttcctcctagagtgccaaaatcttttccattcaacacctcagtcgtgtacaaaaagactctgtttgtagaattcacggatcaccttttcaacatcgctaagccaaggccaccctggatgggtctgctaggtcctaccatccaggctgaggtttatgatacagtggtcattacacttaagaacatggcttcccatcctgtcagtcttcatgctgttggtgtatcctactggaaagcttctgagggagctgaatatgatgatcagaccagtcaaagggagaaagaagatgataaagtcttccctggtggaagccatacatatgtctggcaggtcctgaaagagaatggtccaatggcctctgacccactgtgccttacctactcatatctttctcatgtggacctggtaaaagacttgaattcaggcctcattggagccctactagtatgtagagaagggagtctggccaaggaaaagacacagaccttgcacaaatttatactactttttgctgtatttgatgaagggaaaagttggcactcagaaacaaagaactccttgatgcaggatagggatgctgcatctgctcgggcctggcctaaaatgcacacagtcaatggttatgtaaacaggtctctgccaggtctgattggatgccacaggaaatcagtctattggcatgtgattggaatgggcaccactcctgaagtgcactcaatattcctcgaaggtcacacatttcttgtgaggaaccatcgccaggctagcttggaaatctcgccaataactttccttactgctcaaacactcttgatggaccttggacagtttctactgttttgtcatatctcttcccaccaacatgatggcatggaagcttatgtcaaagtagacagctgtccagaggaaccccaactacgaatgaaaaataatgaagaagcggaagactatgatgatgatcttactgattctgaaatggatgtggtcaggtttgatgatgacaactctccttcctttatccaaattcgctcagttgccaagaagcatcctaaaacttgggtacattacattgctgctgaagaggaggactgggactatgctcccttagtcctcgcccccgatggcgcgccaaccagtacggagccgtccgaggggagcgcaccaggaagcccggctgggagcccgacttctaccgaagagggtacatctaccgaaccaagtgaaggttcagcaccaggcacctcaacagaaccctctgagggctcggcgcctggtacaagtgagtccgccaccccagaatccgggcctgggacaagcacagaaccttcggaagggagtgcccctggaacatccgaatcggcaaccccagaatcagggccaggatctgagcccgcgacttcgggctccgagacgcctgggacatccaccgagccctccgaaggatcagccccaggcaccagcacggagccctctgagggaagcgcacctggtaccagcgaaagcgcaactcccgaatcaggtcccggtacgagcgagtcggcgaccccggagagcgggccaggtgcctcgagcgacagaagttataaaagtcaatatttgaacaatggccctcagcggattggtaggaagtacaaaaaagtccgatttatggcatacacagatgaaacctttaagactcgtgaagctattcagcatgaatcaggaatcttgggacctttactttatggggaagttggagacacactgttgattatatttaagaatcaagcaagcagaccatataacatctaccctcacggaatcactgatgtccgtcctttgtattcaaggagattaccaaaaggtgtaaaacatttgaaggattttccaattctgccaggagaaatattcaaatataaatggacagtgactgtagaagatgggccaactaaatcagatcctcggtgcctgacccgctattactctagtttcgttaatatggagagagatctagcttcaggactcattggccctctcctcatctgctacaaagaatctgtagatcaaagaggaaaccagataatgtcagacaagaggaatgtcatcctgttttctgtatttgatgagaaccgaagctggtacctcacagagaatatacaacgctttctccccaatccagctggagtgcagcttgaggatccagagttccaagcctccaacatcatgcacagcatcaatggctatgtttttgatagtttgcagttgtcagtttgtttgcatgaggtggcatactggtacattctaagcattggagcacagactgacttcctttctgtcttcttctctggatataccttcaaacacaaaatggtctatgaagacacactcaccctattcccattctcaggagaaactgtcttcatgtcgatggaaaacccaggtctatggattctggggtgccacaactcagactttcggaacagaggcatgaccgccttactgaaggtttctagttgtgacaagaacactggtgattattacgaggacagttatgaagatatttcagcatacttgctgagtaaaaacaatgccattgaaccaagaagcttctctcaaaacccaccagtcttgaaacgccatcaacgggaaataactcgtactactcttcagggcgcgccaggtacacccggatcgggtacagcgtcatcgagccccggtgcgtcacctggtacgtcgagcacggggtcgccaggggcgtcccctgggacgtcctcaacaggctcgcccggtgcgtcacccggcacgtcgtccacgggttcacctggtagctccccttccgcgtccactggcaccgggcctggaactccggggagcggcacagcgagctcgtcgccgggagcatcgcctgggacatcgagcaccgggtcgccaggagcatcgcccggaacatccagcacaggaagccccggcgcgtcgcccgggacatcaagcacaggttccccgggatcgagcacgccgtccggagccactggatcaccagggagctcgacaccttccggcgcaacgggatcgcccggagccagcccgggtacgtcaagcactggctcccctgcctcgagctcagatcaagaggaaatcgattatgatgataccatatcagttgaaatgaagaaggaagattttgacatttatgatgaggatgaaaatcagagcccccgcagctttcaaaagaaaacacgacactattttattgctgcagtggagaggctctgggattatgggatgagtagctccccacatgttctaagaaacagggctcagggcgcgccaggtacacccggatcgggtacagcgtcatcgagccccggtgcgtcacctggtacgtcgagcacggggtcgccaggggcgtcccctgggacgtcctcaacaggctcgcccggtgcgtcacccggcacgtcgtccacgggttcacctggtagctccccttccgcgtccactggcaccgggcctggaactccggggagcggcacagcgagctcgtcgccgggagcatcgcctgggacatcgagcaccgggtcgccaggagcatcgcccggaacatccagcacaggaagccccggcgcgtcgcccgggacatcaagcacaggttccccgggatcgagcacgccgtccggagccactggatcaccagggagctcgacaccttccggcgcaacgggatcgcccggagccagcccgggtacgtcaagcactggctcccctgcctcgagcagggctcagagtggcagtgtccctcagttcaagaaagttgttttccaggaatttactgatggctcctttactcagcccttataccgtggagaactaaatgaacatttgggactcctggggccatatataagagcagaagttgaagataatatcatggtaactttcagaaatcaggcctctcgtccctattccttctattctagccttatttcttatgaggaagatcagaggcaaggagcagaacctagaaaaaactttgtcaagcctaatgaaaccaaaacttacttttggaaagtgcaacatcatatggcacccactaaagatgagtttgactgcaaagcctgggcttatttctctgatgttgacctggaaaaagatgtgcactcaggcctgattggaccccttctggtctgccacactaacacactgaaccctgctcatgggagacaagtgacagtacaggaatttgctctgtttttcaccatctttgatgagaccaaaagctggtacttcactgaaaatatggaaagaaactgcaggggcgcgccaacgtccgaaagtgctacccctgagtcaggccctggtagtgagcctgccacaagcggaagcgaaactccggggacctcagagtctgccactcccgaatcggggccaggctctgaaccggccacttcagggagcgaaacaccaggaacatcggagagcgctaccccggagagcgggccaggaactagtactgagcctagcgagggaagtgcacctggtacaagcgagtccgccacacccgagtctggccctggctctccagcgggctcacccacgagcactgaagagggctctcccgctggcagcccaacgtcgacagaagaaggatcaccagcaggctcccccacatcaacagaggagggtacatcagaatctgctactcccgagagtggacccggtacctccactgagcccagcgaggggagtgcaccaggtgcctcgagcgctccctgcaatatccagatggaagatcccacttttaaagagaattatcgcttccatgcaatcaatggctacataatggatacactacctggcttagtaatggctcaggatcaaaggattcgatggtatctgctcagcatgggcagcaatgaaaacatccattctattcatttcagtggacatgtgttcactgtacgaaaaaaagaggagtataaaatggcactgtacaatctctatccaggtgtttttgagacagtggaaatgttaccatccaaagctggaatttggcgggtggaatgccttattggcgagcatctacatgctgggatgagcacactttttctggtgtacagcaataagtgtcagactcccctgggaatggcttctggacacattagagattttcagattacagcttcaggacaatatggacagtgggccccaaagctggccagacttcattattccggatcaatcaatgcctggagcaccaaggagcccttttcttggatcaaggtggatctgttggcaccaatgattattcacggcatcaagacccagggtgcccgtcagaagttctccagcctctacatctctcagtttatcatcatgtatagtcttgatgggaagaagtggcagacttatcgaggaaattccactggaaccttaatggtcttctttggcaatgtggattcatctgggataaaacacaatatttttaaccctccaattattgctcgatacatccgtttgcacccaactcattatagcattcgcagcactcttcgcatggagttgatgggctgtgatttaaatagttgcagcatgccattgggaatggagagtaaagcaatatcagatgcacagattactgcttcatcctactttaccaatatgtttgccacctggtctccttcaaaagctcgacttcacctccaagggaggagtaatgcctggagacctcaggtgaataatccaaaagagtggctgcaagtggacttccagaagacaatgaaagtcacaggagtaactactcagggagtaaaatctctgcttaccagcatgtatgtgaaggagttcctcatctccagcagtcaagatggccatcagtggactctcttttttcagaatggcaaagtaaaggtttttcagggaaatcaagactccttcacacctgtggtgaactctctagacccaccgttactgactcgctaccttcgaattcacccccagagttgggtgcaccagattgccctgaggatggaggttctgggctgcgaggcacaggacctctacggcgcgccaggtacctcagagtctgctacccccgagtcagggccaggatcagagccagccacctccgggtctgagacacccgggacttccgagagtgccacccctgagtccggacccgggtccgagcccgccacttccggctccgaaactcccggcacaagcgagagcgctaccccagagtcaggaccaggaacatctacagagccctctgaaggctccgctccagggtccccagccggcagtcccactagcaccgaggagggaacctctgaaagcgccacacccgaatcagggccagggtctgagcctgctaccagcggcagcgagacaccaggcacctctgagtccgccacaccagagtccggacccggatctcccgctgggagccccacctccactgaggagggatctcctgctggctctccaacatctactgaggaaggtacctcaaccgagccatccgagggatcagctcccggcacctcagagtcggcaaccccggagtctggacccggaacttccgaaagtgccacaccagagtccggtcccgggacttcagaatcagcaacacccgagtccggccctgggtctgaacccgccacaagtggtagtgagacaccaggatcagaacctgctacctcagggtcagagacacccggatctccggcaggctcaccaacctccactgaggagggcaccagcacagaaccaagcgagggctccgcacccggaacaagcactgaacccagtgagggttcagcacccggctctgagccggccacaagtggcagtgagacacccggcacttcagagagtgccacccccgagagtggcccaggcactagtaccgagccctctgaaggcagtgcgccagcctcgagcgaacaaaaactcatctcagaagaggatctgtcacctgcaaccggtcatcatcaccatcaccattga

SEQ ID NO: 1171 - protein, 2356 aa, synthetic construct
  REGION 1..2356: note = Description of Artificial Sequence: Synthetic polypeptide
ATRRYYLGAVELSWDYMQGAPGSSPSASTGTGPGSSPSASTGTGPGASPGTSSTGSPGASPGTSSTGSPGSSTPSGATGSPGSSPSASTGTGPGASPGTSSTGSPGSSPSASTGTGPGTPGSGTASSSPGSSTPSGATGSPGSSTPSGATGSPGASPGTSSTGSPASSSDLGELPVDARFPPRVPKSFPFNTSVVYKKTLFVEFTDHLFNIAKPRPPWMGLLGPTIQAEVYDTVVITLKNMASHPVSLHAVGVSYWKASEGAEYDDQTSQREKEDDKVFPGGSHTYVWQVLKENGPMASDPLCLTYSYLSHVDLVKDLNSGLIGALLVCREGSLAKEKTQTLHKFILLFAVFDEGKSWHSETKNSLMQDRDAASARAWPKMHTVNGYVNRSLPGLIGCHRKSVYWHVIGMGTTPEVHSIFLEGHTFLVRNHRQASLEISPITFLTAQTLLMDLGQFLLFCHISSHQHDGMEAYVKVDSCPEEPQLRMKNNEEAEDYDDDLTDSEMDVVRFDDDNSPSFIQIRSVAKKHPKTWVHYIAAEEEDWDYAPLVLAPDGAPTSTEPSEGSAPGSPAGSPTSTEEGTSTEPSEGSAPGTSTEPSEGSAPGTSESATPESGPGTSTEPSEGSAPGTSESATPESGPGSEPATSGSETPGTSTEPSEGSAPGTSTEPSEGSAPGTSESATPESGPGTSESATPESGPGASSDRSYKSQYLNNGPQRIGRKYKKVRFMAYTDETFKTREAIQHESGILGPLLYGEVGDTLLIIFKNQASRPYNIYPHGITDVRPLYSRRLPKGVKHLKDFPILPGEIFKYKWTVTVEDGPTKSDPRCLTRYYSSFVNMERDLASGLIGPLLICYKESVDQRGNQIMSDKRNVILFSVFDENRSWYLTENIQRFLPNPAGVQLEDPEFQASNIMHSINGYVFDSLQLSVCLHEVAYWYILSIGAQTDFLSVFFSGYTFKHKMVYEDTLTLFPFSGETVFMSMENPGLWILGCHNSDFRNRGMTALLKVSSCDKNTGDYYEDSYEDISAYLLSKNNAIEPRSFSQNGAPSPAGSPTSTEEGTSESATPESGPGSEPATSGSETPGTSESATPESGPGTSTEPSEGSAPGTSTEPSEGSAPGTSTEPSEGSAPGTSTEPSEGSAPGTSTEPSEGSAPGTSTEPSEGSAPGSPAGSPTSTEEGTSTEPSEGSAPGASSPPVLKRHQAEITRTTLQSDQEEIDYDDTISVEMKKEDFDIYDEDENQSPRSFQKKTRHYFIAAVERLWDYGMSSSPHVLRNRAQGAPGTPGSGTASSSPGASPGTSSTGSPGASPGTSSTGSPGASPGTSSTGSPGSSPSASTGTGPGTPGSGTASSSPGASPGTSSTGSPGASPGTSSTGSPGASPGTSSTGSPGSSTPSGATGSPGSSTPSGATGSPGASPGTSSTGSPASSRAQSGSVPQFKKVVFQEFTDGSFTQPLYRGELNEHLGLLGPYIRAEVEDNIMVTFRNQASRPYSFYSSLISYEEDQRQGAEPRKNFVKPNETKTYFWKVQHHMAPTKDEFDCKAWAYFSDVDLEKDVHSGLIGPLLVCHTNTLNPAHGRQVTVQEFALFFTIFDETKSWYFTENMERNCRAPCNIQMEDPTFKENYRFHAINGYIMDTLPGLVMAQDQRIRWYLLSMGSNENIHSIHFSGHVFTVRKKEEYKMALYNLYPGVFETVEMLPSKAGIWRVECLIGEHLHAGMSTLFLVYSNKCQTPLGMASGHIRDFQITASGQYGQWAPKLARLHYSGSINAWSTKEPFSWIKVDLLAPMIIHGIKTQGARQKFSSLYISQFIIMYSLDGKKWQTYRGNSTGTLMVFFGNVDSSGIKHNIFNPPIIARYIRLHPTHYSIRSTLRMELMGCDLNSCSMPLGMESKAISDAQITASSYFTNMFATWSPSKARLHLQGRSNAWRPQVNNPKEWLQVDFQKTMKVTGVTTQGVKSLLTSMYVKEFLISSSQDGHQWTLFFQNGKVKVFQGNQDSFTPVVNSLDPPLLTRYLRIHPQSWVHQIALRMEVLGCEAQDLYGAPGTSESATPESGPGSEPATSGSETPGTSESATPESGPGSEPATSGSETPGTSESATPESGPGTSTEPSEGSAPGSPAGSPTSTEEGTSESATPESGPGSEPATSGSETPGTSESATPESGPGSPAGSPTSTEEGSPAGSPTSTEEGTSTEPSEGSAPGTSESATPESGPGTSESATPESGPGTSESATPESGPGSEPATSGSETPGSEPATSGSETPGSPAGSPTSTEEGTSTEPSEGSAPGTSTEPSEGSAPGSEPATSGSETPGTSESATPESGPGTSTEPSEGSAPASSEQKLISEEDLSPATGHHHHHH

SEQ ID NO: 1172 - DNA, 7071 bp, synthetic construct
  misc_feature 1..7071: note = Description of Artificial Sequence: Synthetic polynucleotide
  source 1..7071: mol_type = other DNA
gccaccagaagatactacctgggtgcagtggaactgtcatgggactatatgcaaggcgcgccaggctccagcccctccgcgagcacgggaaccggaccaggttcgtcaccctcagcatcaacggggacgggaccgggggcgtcaccaggaacgtcctccaccggctcgccgggtgcatcacccggaacgtcatcgaccggatcgccagggagctcgacgccatcaggcgcaacaggatcacctggctcaagccctagcgcgtcaaccggcacgggtccgggtgcctcccctggcacgtccagcaccggatcacccggatcgagcccatccgcctcaaccggaaccggacccggtacaccagggtcgggaacagcctcctcgtcaccaggctcctcaaccccctcgggagccacgggttcgcccggttcgtcaacgccttccggagcaactggtagccccggagcatcgccaggaacttcgagcacggggtcgcccgcctcgagcagtgatctcggtgagctgcctgtggacgcaagatttcctcctagagtgccaaaatcttttccattcaacacctcagtcgtgtacaaaaagactctgtttgtagaattcacggatcaccttttcaacatcgctaagccaaggccaccctggatgggtctgctaggtcctaccatccaggctgaggtttatgatacagtggtcattacacttaagaacatggcttcccatcctgtcagtcttcatgctgttggtgtatcctactggaaagcttctgagggagctgaatatgatgatcagaccagtcaaagggagaaagaagatgataaagtcttccctggtggaagccatacatatgtctggcaggtcctgaaagagaatggtccaatggcctctgacccactgtgccttacctactcatatctttctcatgtggacctggtaaaagacttgaattcaggcctcattggagccctactagtatgtagagaagggagtctggccaaggaaaagacacagaccttgcacaaatttatactactttttgctgtatttgatgaagggaaaagttggcactcagaaacaaagaactccttgatgcaggatagggatgctgcatctgctcgggcctggcctaaaatgcacacagtcaatggttatgtaaacaggtctctgccaggtctgattggatgccacaggaaatcagtctattggcatgtgattggaatgggcaccactcctgaagtgcactcaatattcctcgaaggtcacacatttcttgtgaggaaccatcgccaggctagcttggaaatctcgccaataactttccttactgctcaaacactcttgatggaccttggacagtttctactgttttgtcatatctcttcccaccaacatgatggcatggaagcttatgtcaaagtagacagctgtccagaggaaccccaactacgaatgaaaaataatgaagaagcggaagactatgatgatgatcttactgattctgaaatggatgtggtcaggtttgatgatgacaactctccttcctttatccaaattcgctcagttgccaagaagcatcctaaaacttgggtacattacattgctgctgaagaggaggactgggactatgctcccttagtcctcgcccccgatggcgcgccaaccagtacggagccgtccgaggggagcgcaccaggaagcccggctgggagcccgacttctaccgaagagggtacatctaccgaaccaagtgaaggttcagcaccaggcacctcaacagaaccctctgagggctcggcgcctggtacaagtgagtccgccaccccagaatccgggcctgggacaagcacagaaccttcggaagggagtgcccctggaacatccgaatcggcaaccccagaatcagggccaggatctgagcccgcgacttcgggctccgagacgcctgggacatccaccgagccctccgaaggatcagccccaggcaccagcacggagccctctgagggaagcgcacctggtaccagcgaaagcgcaactcccgaatcaggtcccggtacgagcgagtcggcgaccccggagagcgggccaggtgcctcgagcgacagaagttataaaagtcaatatttgaacaatggccctcagcggattggtaggaagtacaaaaaagtccgatttatggcatacacagatgaaacctttaagactcgtgaagctattcagcatgaatcaggaatcttgggacctttactttatggggaagttggagacacactgttgattatatttaagaatcaagcaagcagaccatataacatctaccctcacggaatcactgatgtccgtcctttgtattcaaggagattaccaaaaggtgtaaaacatttgaaggattttccaattctgccaggagaaatattcaaatataaatggacagtgactgtagaagatgggccaactaaatcagatcctcggtgcctgacccgctattactctagtttcgttaatatggagagagatctagcttcaggactcattggccctctcctcatctgctacaaagaatctgtagatcaaagaggaaaccagataatgtcagacaagaggaatgtcatcctgttttctgtatttgatgagaaccgaagctggtacctcacagagaatatacaacgctttctccccaatccagctggagtgcagcttgaggatccagagttccaagcctccaacatcatgcacagcatcaatggctatgtttttgatagtttgcagttgtcagtttgtttgcatgaggtggcatactggtacattctaagcattggagcacagactgacttcctttctgtcttcttctctggatataccttcaaacacaaaatggtctatgaagacacactcaccctattcccattctcaggagaaactgtcttcatgtcgatggaaaacccaggtctatggattctggggtgccacaactcagactttcggaacagaggcatgaccgccttactgaaggtttctagttgtgacaagaacactggtgattattacgaggacagttatgaagatatttcagcatacttgctgagtaaaaacaatgccattgaaccaagaagcttctctcaaaacggcgcgccaagtcccgctggaagcccaactagcaccgaagaggggacctcagagtccgccacccccgagtccggccctggctctgagcctgccactagcggctccgagactcctggcacatccgaaagcgctacacccgagagtggacccggcacctctaccgagcccagtgagggctccgcccctggaacaagcaccgagcccagcgaaggcagcgccccagggacctccacagagcccagtgaaggcagtgctcctggcaccagcaccgaaccaagcgagggctctgcacccgggacctccaccgagccaagcgaaggctctgcccctggcacttccaccgagcccagcgaaggcagcgcccctgggagccccgctggctctcccaccagcactgaggagggcacatctaccgaaccaagtgaaggctctgcaccaggtgcctcgagcccaccagtcttgaaacgccatcaagctgaaataactcgtactactcttcagtcagatcaagaggaaatcgattatgatgataccatatcagttgaaatgaagaaggaagattttgacatttatgatgaggatgaaaatcagagcccccgcagctttcaaaagaaaacacgacactattttattgctgcagtggagaggctctgggattatgggatgagtagctccccacatgttctaagaaacagggctcagggcgcgccaggtacacccggatcgggtacagcgtcatcgagccccggtgcgtcacctggtacgtcgagcacggggtcgccaggggcgtcccctgggacgtcctcaacaggctcgcccggtgcgtcacccggcacgtcgtccacgggttcacctggtagctccccttccgcgtccactggcaccgggcctggaactccggggagcggcacagcgagctcgtcgccgggagcatcgcctgggacatcgagcaccgggtcgccaggagcatcgcccggaacatccagcacaggaagccccggcgcgtcgcccgggacatcaagcacaggttccccgggatcgagcacgccgtccggagccactggatcaccagggagctcgacaccttccggcgcaacgggatcgcccggagccagcccgggtacgtcaagcactggctcccctgcctcgagcagggctcagagtggcagtgtccctcagttcaagaaagttgttttccaggaatttactgatggctcctttactcagcccttataccgtggagaactaaatgaacatttgggactcctggggccatatataagagcagaagttgaagataatatcatggtaactttcagaaatcaggcctctcgtccctattccttctattctagccttatttcttatgaggaagatcagaggcaaggagcagaacctagaaaaaactttgtcaagcctaatgaaaccaaaacttacttttggaaagtgcaacatcatatggcacccactaaagatgagtttgactgcaaagcctgggcttatttctctgatgttgacctggaaaaagatgtgcactcaggcctgattggaccccttctggtctgccacactaacacactgaaccctgctcatgggagacaagtgacagtacaggaatttgctctgtttttcaccatctttgatgagaccaaaagctggtacttcactgaaaatatggaaagaaactgcagggctccctgcaatatccagatggaagatcccacttttaaagagaattatcgcttccatgcaatcaatggctacataatggatacactacctggcttagtaatggctcaggatcaaaggattcgatggtatctgctcagcatgggcagcaatgaaaacatccattctattcatttcagtggacatgtgttcactgtacgaaaaaaagaggagtataaaatggcactgtacaatctctatccaggtgtttttgagacagtggaaatgttaccatccaaagctggaatttggcgggtggaatgccttattggcgagcatctacatgctgggatgagcacactttttctggtgtacagcaataagtgtcagactcccctgggaatggcttctggacacattagagattttcagattacagcttcaggacaatatggacagtgggccccaaagctggccagacttcattattccggatcaatcaatgcctggagcaccaaggagcccttttcttggatcaaggtggatctgttggcaccaatgattattcacggcatcaagacccagggtgcccgtcagaagttctccagcctctacatctctcagtttatcatcatgtatagtcttgatgggaagaagtggcagacttatcgaggaaattccactggaaccttaatggtcttctttggcaatgtggattcatctgggataaaacacaatatttttaaccctccaattattgctcgatacatccgtttgcacccaactcattatagcattcgcagcactcttcgcatggagttgatgggctgtgatttaaatagttgcagcatgccattgggaatggagagtaaagcaatatcagatgcacagattactgcttcatcctactttaccaatatgtttgccacctggtctccttcaaaagctcgacttcacctccaagggaggagtaatgcctggagacctcaggtgaataatccaaaagagtggctgcaagtggacttccagaagacaatgaaagtcacaggagtaactactcagggagtaaaatctctgcttaccagcatgtatgtgaaggagttcctcatctccagcagtcaagatggccatcagtggactctcttttttcagaatggcaaagtaaaggtttttcagggaaatcaagactccttcacacctgtggtgaactctctagacccaccgttactgactcgctaccttcgaattcacccccagagttgggtgcaccagattgccctgaggatggaggttctgggctgcgaggcacaggacctctacggcgcgccaggtacctcagagtctgctacccccgagtcagggccaggatcagagccagccacctccgggtctgagacacccgggacttccgagagtgccacccctgagtccggacccgggtccgagcccgccacttccggctccgaaactcccggcacaagcgagagcgctaccccagagtcaggaccaggaacatctacagagccctctgaaggctccgctccagggtccccagccggcagtcccactagcaccgaggagggaacctctgaaagcgccacacccgaatcagggccagggtctgagcctgctaccagcggcagcgagacaccaggcacctctgagtccgccacaccagagtccggacccggatctcccgctgggagccccacctccactgaggagggatctcctgctggctctccaacatctactgaggaaggtacctcaaccgagccatccgagggatcagctcccggcacctcagagtcggcaaccccggagtctggacccggaacttccgaaagtgccacaccagagtccggtcccgggacttcagaatcagcaacacccgagtccggccctgggtctgaacccgccacaagtggtagtgagacaccaggatcagaacctgctacctcagggtcagagacacccggatctccggcaggctcaccaacctccactgaggagggcaccagcacagaaccaagcgagggctccgcacccggaacaagcactgaacccagtgagggttcagcacccggctctgagccggccacaagtggcagtgagacacccggcacttcagagagtgccacccccgagagtggcccaggcactagtaccgagccctctgaaggcagtgcgccagcctcgagcgaacaaaaactcatctcagaagaggatctgtcacctgcaaccggtcatcatcaccatcaccattga

SEQ ID NO: 1173 - protein, 2353 aa, synthetic construct
  REGION 1..2353: note = Description of Artificial Sequence: Synthetic polypeptide
ATRRYYLGAVELSWDYMQGAPGSSPSASTGTGPGSSPSASTGTGPGASPGTSSTGSPGASPGTSSTGSPGSSTPSGATGSPGSSPSASTGTGPGASPGTSSTGSPGSSPSASTGTGPGTPGSGTASSSPGSSTPSGATGSPGSSTPSGATGSPGASPGTSSTGSPASSSDLGELPVDARFPPRVPKSFPFNTSVVYKKTLFVEFTDHLFNIAKPRPPWMGLLGPTIQAEVYDTVVITLKNMASHPVSLHAVGVSYWKASEGAEYDDQTSQREKEDDKVFPGGSHTYVWQVLKENGPMASDPLCLTYSYLSHVDLVKDLNSGLIGALLVCREGSLAKEKTQTLHKFILLFAVFDEGKSWHSETKNSLMQDRDAASARAWPKMHTVNGYVNRSLPGLIGCHRKSVYWHVIGMGTTPEVHSIFLEGHTFLVRNHRQASLEISPITFLTAQTLLMDLGQFLLFCHISSHQHDGMEAYVKVDSCPEEPQLRMKNNEEAEDYDDDLTDSEMDVVRFDDDNSPSFIQIRSVAKKHPKTWVHYIAAEEEDWDYAPLVLAPDGAPTSTEPSEGSAPGSPAGSPTSTEEGTSTEPSEGSAPGTSTEPSEGSAPGTSESATPESGPGTSTEPSEGSAPGTSESATPESGPGSEPATSGSETPGTSTEPSEGSAPGTSTEPSEGSAPGTSESATPESGPGTSESATPESGPGASSDRSYKSQYLNNGPQRIGRKYKKVRFMAYTDETFKTREAIQHESGILGPLLYGEVGDTLLIIFKNQASRPYNIYPHGITDVRPLYSRRLPKGVKHLKDFPILPGEIFKYKWTVTVEDGPTKSDPRCLTRYYSSFVNMERDLASGLIGPLLICYKESVDQRGNQIMSDKRNVILFSVFDENRSWYLTENIQRFLPNPAGVQLEDPEFQASNIMHSINGYVFDSLQLSVCLHEVAYWYILSIGAQTDFLSVFFSGYTFKHKMVYEDTLTLFPFSGETVFMSMENPGLWILGCHNSDFRNRGMTALLKVSSCDKNTGDYYEDSYEDISAYLLSKNNAIEPRSFSQNGAPSPAGSPTSTEEGTSESATPESGPGSEPATSGSETPGTSESATPESGPGTSTEPSEGSAPGTSTEPSEGSAPGTSTEPSEGSAPGTSTEPSEGSAPGTSTEPSEGSAPGTSTEPSEGSAPGSPAGSPTSTEEGTSTEPSEGSAPGASSPPVLKRHQAEITRTTLQSDQEEIDYDDTISVEMKKEDFDIYDEDENQSPRSFQKKTRHYFIAAVERLWDYGMSSSPHVLRNRAQSGSVPQFKKVVFQEFTDGSFTQPLYRGELNEHLGLLGPYIRAEVEDNIMVTFRNQASRPYSFYSSLISYEEDQRQGAEPRKNFVKPNETKTYFWKVQHHMAPTKDEFDCKAWAYFSDVDLEKDVHSGLIGPLLVCHTNTLNPAHGRQVTVQEFALFFTIFDETKSWYFTENMERNCRGAPTSESATPESGPGSEPATSGSETPGTSESATPESGPGSEPATSGSETPGTSESATPESGPGTSTEPSEGSAPGTSESATPESGPGSPAGSPTSTEEGSPAGSPTSTEEGSPAGSPTSTEEGTSESATPESGPGTSTEPSEGSAPGASSAPCNIQMEDPTFKENYRFHAINGYIMDTLPGLVMAQDQRIRWYLLSMGSNENIHSIHFSGHVFTVRKKEEYKMALYNLYPGVFETVEMLPSKAGIWRVECLIGEHLHAGMSTLFLVYSNKCQTPLGMASGHIRDFQITASGQYGQWAPKLARLHYSGSINAWSTKEPFSWIKVDLLAPMIIHGIKTQGARQKFSSLYISQFIIMYSLDGKKWQTYRGNSTGTLMVFFGNVDSSGIKHNIFNPPIIARYIRLHPTHYSIRSTLRMELMGCDLNSCSMPLGMESKAISDAQITASSYFTNMFATWSPSKARLHLQGRSNAWRPQVNNPKEWLQVDFQKTMKVTGVTTQGVKSLLTSMYVKEFLISSSQDGHQWTLFFQNGKVKVFQGNQDSFTPVVNSLDPPLLTRYLRIHPQSWVHQIALRMEVLGCEAQDLYGAPGTSESATPESGPGSEPATSGSETPGTSESATPESGPGSEPATSGSETPGTSESATPESGPGTSTEPSEGSAPGSPAGSPTSTEEGTSESATPESGPGSEPATSGSETPGTSESATPESGPGSPAGSPTSTEEGSPAGSPTSTEEGTSTEPSEGSAPGTSESATPESGPGTSESATPESGPGTSESATPESGPGSEPATSGSETPGSEPATSGSETPGSPAGSPTSTEEGTSTEPSEGSAPGTSTEPSEGSAPGSEPATSGSETPGTSESATPESGPGTSTEPSEGSAPASSEQKLISEEDLSPATGHHHHHH

SEQ ID NO: 1174 - DNA, 7062 bp, synthetic construct
  misc_feature 1..7062: note = Description of Artificial Sequence: Synthetic polynucleotide
  source 1..7062: mol_type = other DNA
gccaccagaagatactacctgggtgcagtggaactgtcatgggactatatgcaaggcgcgccaggctccagcccctccgcgagcacgggaaccggaccaggttcgtcaccctcagcatcaacggggacgggaccgggggcgtcaccaggaacgtcctccaccggctcgccgggtgcatcacccggaacgtcatcgaccggatcgccagggagctcgacgccatcaggcgcaacaggatcacctggctcaagccctagcgcgtcaaccggcacgggtccgggtgcctcccctggcacgtccagcaccggatcacccggatcgagcccatccgcctcaaccggaaccggacccggtacaccagggtcgggaacagcctcctcgtcaccaggctcctcaaccccctcgggagccacgggttcgcccggttcgtcaacgccttccggagcaactggtagccccggagcatcgccaggaacttcgagcacggggtcgcccgcctcgagcagtgatctcggtgagctgcctgtggacgcaagatttcctcctagagtgccaaaatcttttccattcaacacctcagtcgtgtacaaaaagactctgtttgtagaattcacggatcaccttttcaacatcgctaagccaaggccaccctggatgggtctgctaggtcctaccatccaggctgaggtttatgatacagtggtcattacacttaagaacatggcttcccatcctgtcagtcttcatgctgttggtgtatcctactggaaagcttctgagggagctgaatatgatgatcagaccagtcaaagggagaaagaagatgataaagtcttccctggtggaagccatacatatgtctggcaggtcctgaaagagaatggtccaatggcctctgacccactgtgccttacctactcatatctttctcatgtggacctggtaaaagacttgaattcaggcctcattggagccctactagtatgtagagaagggagtctggccaaggaaaagacacagaccttgcacaaatttatactactttttgctgtatttgatgaagggaaaagttggcactcagaaacaaagaactccttgatgcaggatagggatgctgcatctgctcgggcctggcctaaaatgcacacagtcaatggttatgtaaacaggtctctgccaggtctgattggatgccacaggaaatcagtctattggcatgtgattggaatgggcaccactcctgaagtgcactcaatattcctcgaaggtcacacatttcttgtgaggaaccatcgccaggctagcttggaaatctcgccaataactttccttactgctcaaacactcttgatggaccttggacagtttctactgttttgtcatatctcttcccaccaacatgatggcatggaagcttatgtcaaagtagacagctgtccagaggaaccccaactacgaatgaaaaataatgaagaagcggaagactatgatgatgatcttactgattctgaaatggatgtggtcaggtttgatgatgacaactctccttcctttatccaaattcgctcagttgccaagaagcatcctaaaacttgggtacattacattgctgctgaagaggaggactgggactatgctcccttagtcctcgcccccgatggcgcgccaaccagtacggagccgtccgaggggagcgcaccaggaagcccggctgggagcccgacttctaccgaagagggtacatctaccgaaccaagtgaaggttcagcaccaggcacctcaacagaaccctctgagggctcggcgcctggtacaagtgagtccgccaccccagaatccgggcctgggacaagcacagaaccttcggaagggagtgcccctggaacatccgaatcggcaaccccagaatcagggccaggatctgagcccgcgacttcgggctccgagacgcctgggacatccaccgagccctccgaaggatcagccccaggcaccagcacggagccctctgagggaagcgcacctggtaccagcgaaagcgcaactcccgaatcaggtcccggtacgagcgagtcggcgaccccggagagcgggccaggtgcctcgagcgacagaagttataaaagtcaatatttgaacaatggccctcagcggattggtaggaagtacaaaaaagtccgatttatggcatacacagatgaaacctttaagactcgtgaagctattcagcatgaatcaggaatcttgggacctttactttatggggaagttggagacacactgttgattatatttaagaatcaagcaagcagaccatataacatctaccctcacggaatcactgatgtccgtcctttgtattcaaggagattaccaaaaggtgtaaaacatttgaaggattttccaattctgccaggagaaatattcaaatataaatggacagtgactgtagaagatgggccaactaaatcagatcctcggtgcctgacccgctattactctagtttcgttaatatggagagagatctagcttcaggactcattggccctctcctcatctgctacaaagaatctgtagatcaaagaggaaaccagataatgtcagacaagaggaatgtcatcctgttttctgtatttgatgagaaccgaagctggtacctcacagagaatatacaacgctttctccccaatccagctggagtgcagcttgaggatccagagttccaagcctccaacatcatgcacagcatcaatggctatgtttttgatagtttgcagttgtcagtttgtttgcatgaggtggcatactggtacattctaagcattggagcacagactgacttcctttctgtcttcttctctggatataccttcaaacacaaaatggtctatgaagacacactcaccctattcccattctcaggagaaactgtcttcatgtcgatggaaaacccaggtctatggattctggggtgccacaactcagactttcggaacagaggcatgaccgccttactgaaggtttctagttgtgacaagaacactggtgattattacgaggacagttatgaagatatttcagcatacttgctgagtaaaaacaatgccattgaaccaagaagcttctctcaaaacggcgcgccaagtcccgctggaagcccaactagcaccgaagaggggacctcagagtccgccacccccgagtccggccctggctctgagcctgccactagcggctccgagactcctggcacatccgaaagcgctacacccgagagtggacccggcacctctaccgagcccagtgagggctccgcccctggaacaagcaccgagcccagcgaaggcagcgccccagggacctccacagagcccagtgaaggcagtgctcctggcaccagcaccgaaccaagcgagggctctgcacccgggacctccaccgagccaagcgaaggctctgcccctggcacttccaccgagcccagcgaaggcagcgcccctgggagccccgctggctctcccaccagcactgaggagggcacatctaccgaaccaagtgaaggctctgcaccaggtgcctcgagcccaccagtcttgaaacgccatcaagctgaaataactcgtactactcttcagtcagatcaagaggaaatcgattatgatgataccatatcagttgaaatgaagaaggaagattttgacatttatgatgaggatgaaaatcagagcccccgcagctttcaaaagaaaacacgacactattttattgctgcagtggagaggctctgggattatgggatgagtagctccccacatgttctaagaaacagggctcagagtggcagtgtccctcagttcaagaaagttgttttccaggaatttactgatggctcctttactcagcccttataccgtggagaactaaatgaacatttgggactcctggggccatatataagagcagaagttgaagataatatcatggtaactttcagaaatcaggcctctcgtccctattccttctattctagccttatttcttatgaggaagatcagaggcaaggagcagaacctagaaaaaactttgtcaagcctaatgaaaccaaaacttacttttggaaagtgcaacatcatatggcacccactaaagatgagtttgactgcaaagcctgggcttatttctctgatgttgacctggaaaaagatgtgcactcaggcctgattggaccccttctggtctgccacactaacacactgaaccctgctcatgggagacaagtgacagtacaggaatttgctctgtttttcaccatctttgatgagaccaaaagctggtacttcactgaaaatatggaaagaaactgcaggggcgcgccaacgtccgaaagtgctacccctgagtcaggccctggtagtgagcctgccacaagcggaagcgaaactccggggacctcagagtctgccactcccgaatcggggccaggctctgaaccggccacttcagggagcgaaacaccaggaacatcggagagcgctaccccggagagcgggccaggaactagtactgagcctagcgagggaagtgcacctggtacaagcgagtccgccacacccgagtctggccctggctctccagcgggctcacccacgagcactgaagagggctctcccgctggcagcccaacgtcgacagaagaaggatcaccagcaggctcccccacatcaacagaggagggtacatcagaatctgctactcccgagagtggacccggtacctccactgagcccagcgaggggagtgcaccaggtgcctcgagcgctccctgcaatatccagatggaagatcccacttttaaagagaattatcgcttccatgcaatcaatggctacataatggatacactacctggcttagtaatggctcaggatcaaaggattcgatggtatctgctcagcatgggcagcaatgaaaacatccattctattcatttcagtggacatgtgttcactgtacgaaaaaaagaggagtataaaatggcactgtacaatctctatccaggtgtttttgagacagtggaaatgttaccatccaaagctggaatttggcgggtggaatgccttattggcgagcatctacatgctgggatgagcacactttttctggtgtacagcaataagtgtcagactcccctgggaatggcttctggacacattagagattttcagattacagcttcaggacaatatggacagtgggccccaaagctggccagacttcattattccggatcaatcaatgcctggagcaccaaggagcccttttcttggatcaaggtggatctgttggcaccaatgattattcacggcatcaagacccagggtgcccgtcagaagttctccagcctctacatctctcagtttatcatcatgtatagtcttgatgggaagaagtggcagacttatcgaggaaattccactggaaccttaatggtcttctttggcaatgtggattcatctgggataaaacacaatatttttaaccctccaattattgctcgatacatccgtttgcacccaactcattatagcattcgcagcactcttcgcatggagttgatgggctgtgatttaaatagttgcagcatgccattgggaatggagagtaaagcaatatcagatgcacagattactgcttcatcctactttaccaatatgtttgccacctggtctccttcaaaagctcgacttcacctccaagggaggagtaatgcctggagacctcaggtgaataatccaaaagagtggctgcaagtggacttccagaagacaatgaaagtcacaggagtaactactcagggagtaaaatctctgcttaccagcatgtatgtgaaggagttcctcatctccagcagtcaagatggccatcagtggactctcttttttcagaatggcaaagtaaaggtttttcagggaaatcaagactccttcacacctgtggtgaactctctagacccaccgttactgactcgctaccttcgaattcacccccagagttgggtgcaccagattgccctgaggatggaggttctgggctgcgaggcacaggacctctacggcgcgccaggtacctcagagtctgctacccccgagtcagggccaggatcagagccagccacctccgggtctgagacacccgggacttccgagagtgccacccctgagtccggacccgggtccgagcccgccacttccggctccgaaactcccggcacaagcgagagcgctaccccagagtcaggaccaggaacatctacagagccctctgaaggctccgctccagggtccccagccggcagtcccactagcaccgaggagggaacctctgaaagcgccacacccgaatcagggccagggtctgagcctgctaccagcggcagcgagacaccaggcacctctgagtccgccacaccagagtccggacccggatctcccgctgggagccccacctccactgaggagggatctcctgctggctctccaacatctactgaggaaggtacctcaaccgagccatccgagggatcagctcccggcacctcagagtcggcaaccccggagtctggacccggaacttccgaaagtgccacaccagagtccggtcccgggacttcagaatcagcaacacccgagtccggccctgggtctgaacccgccacaagtggtagtgagacaccaggatcagaacctgctacctcagggtcagagacacccggatctccggcaggctcaccaacctccactgaggagggcaccagcacagaaccaagcgagggctccgcacccggaacaagcactgaacccagtgagggttcagcacccggctctgagccggccacaagtggcagtgagacacccggcacttcagagagtgccacccccgagagtggcccaggcactagtaccgagccctctgaaggcagtgcgccagcctcgagcgaacaaaaactcatctcagaagaggatctgtcacctgcaaccggtcatcatcaccatcaccattga

SEQ ID NO: 1175 - protein, 2203 aa, synthetic construct
  REGION 1..2203: note = Description of Artificial Sequence: Synthetic polypeptide
ATRRYYLGAVELSWDYMQGAPGSSPSASTGTGPGSSPSASTGTGPGASPGTSSTGSPGASPGTSSTGSPGSSTPSGATGSPGSSPSASTGTGPGASPGTSSTGSPGSSPSASTGTGPGTPGSGTASSSPGSSTPSGATGSPGSSTPSGATGSPGASPGTSSTGSPASSSDLGELPVDARFPPRVPKSFPFNTSVVYKKTLFVEFTDHLFNIAKPRPPWMGLLGPTIQAEVYDTVVITLKNMASHPVSLHAVGVSYWKASEGAEYDDQTSQREKEDDKVFPGGSHTYVWQVLKENGPMASDPLCLTYSYLSHVDLVKDLNSGLIGALLVCREGSLAKEKTQTLHKFILLFAVFDEGKSWHSETKNSLMQDRDAASARAWPKMHTVNGYVNRSLPGLIGCHRKSVYWHVIGMGTTPEVHSIFLEGHTFLVRNHRQASLEISPITFLTAQTLLMDLGQFLLFCHISSHQHDGMEAYVKVDSCPEEPQLRMKNNEEAEDYDDDLTDSEMDVVRFDDDNSPSFIQIRSVAKKHPKTWVHYIAAEEEDWDYAPLVLAPDDRSYKSQYLNNGPQRIGRKYKKVRFMAYTDETFKTREAIQHESGILGPLLYGEVGDTLLIIFKNQASRPYNIYPHGITDVRPLYSRRLPKGVKHLKDFPILPGEIFKYKWTVTVEDGPTKSDPRCLTRYYSSFVNMERDLASGLIGPLLICYKESVDQRGNQIMSDKRNVILFSVFDENRSWYLTENIQRFLPNPAGVQLEDPEFQASNIMHSINGYVFDSLQLSVCLHEVAYWYILSIGAQTDFLSVFFSGYTFKHKMVYEDTLTLFPFSGETVFMSMENPGLWILGCHNSDFRNRGMTALLKVSSCDKNTGDYYEDSYEDISAYLLSKNNAIEPRSFSQNGAPSPAGSPTSTEEGTSESATPESGPGSEPATSGSETPGTSESATPESGPGTSTEPSEGSAPGTSTEPSEGSAPGTSTEPSEGSAPGTSTEPSEGSAPGTSTEPSEGSAPGTSTEPSEGSAPGSPAGSPTSTEEGTSTEPSEGSAPGASSPPVLKRHQAEITRTTLQSDQEEIDYDDTISVEMKKEDFDIYDEDENQSPRSFQKKTRHYFIAAVERLWDYGMSSSPHVLRNRAQSGSVPQFKKVVFQEFTDGSFTQPLYRGELNEHLGLLGPYIRAEVEDNIMVTFRNQASRPYSFYSSLISYEEDQRQGAEPRKNFVKPNETKTYFWKVQHHMAPTKDEFDCKAWAYFSDVDLEKDVHSGLIGPLLVCHTNTLNPAHGRQVTVQEFALFFTIFDETKSWYFTENMERNCRGAPTSESATPESGPGSEPATSGSETPGTSESATPESGPGSEPATSGSETPGTSESATPESGPGTSTEPSEGSAPGTSESATPESGPGSPAGSPTSTEEGSPAGSPTSTEEGSPAGSPTSTEEGTSESATPESGPGTSTEPSEGSAPGASSAPCNIQMEDPTFKENYRFHAINGYIMDTLPGLVMAQDQRIRWYLLSMGSNENIHSIHFSGHVFTVRKKEEYKMALYNLYPGVFETVEMLPSKAGIWRVECLIGEHLHAGMSTLFLVYSNKCQTPLGMASGHIRDFQITASGQYGQWAPKLARLHYSGSINAWSTKEPFSWIKVDLLAPMIIHGIKTQGARQKFSSLYISQFIIMYSLDGKKWQTYRGNSTGTLMVFFGNVDSSGIKHNIFNPPIIARYIRLHPTHYSIRSTLRMELMGCDLNSCSMPLGMESKAISDAQITASSYFTNMFATWSPSKARLHLQGRSNAWRPQVNNPKEWLQVDFQKTMKVTGVTTQGVKSLLTSMYVKEFLISSSQDGHQWTLFFQNGKVKVFQGNQDSFTPVVNSLDPPLLTRYLRIHPQSWVHQIALRMEVLGCEAQDLYGAPGTSESATPESGPGSEPATSGSETPGTSESATPESGPGSEPATSGSETPGTSESATPESGPGTSTEPSEGSAPGSPAGSPTSTEEGTSESATPESGPGSEPATSGSETPGTSESATPESGPGSPAGSPTSTEEGSPAGSPTSTEEGTSTEPSEGSAPGTSESATPESGPGTSESATPESGPGTSESATPESGPGSEPATSGSETPGSEPATSGSETPGSPAGSPTSTEEGTSTEPSEGSAPGTSTEPSEGSAPGSEPATSGSETPGTSESATPESGPGTSTEPSEGSAPASSEQKLISEEDLSPATGHHHHHH

SEQ ID NO: 1176 - DNA, 6612 bp, synthetic construct
  misc_feature 1..6612: note = Description of Artificial Sequence: Synthetic polynucleotide
  source 1..6612: mol_type = other DNA
gccaccagaagatactacctgggtgcagtggaactgtcatgggactatatgcaaggcgcgccaggctccagcccctccgcgagcacgggaaccggaccaggttcgtcaccctcagcatcaacggggacgggaccgggggcgtcaccaggaacgtcctccaccggctcgccgggtgcatcacccggaacgtcatcgaccggatcgccagggagctcgacgccatcaggcgcaacaggatcacctggctcaagccctagcgcgtcaaccggcacgggtccgggtgcctcccctggcacgtccagcaccggatcacccggatcgagcccatccgcctcaaccggaaccggacccggtacaccagggtcgggaacagcctcctcgtcaccaggctcctcaaccccctcgggagccacgggttcgcccggttcgtcaacgccttccggagcaactggtagccccggagcatcgccaggaacttcgagcacggggtcgcccgcctcgagcagtgatctcggtgagctgcctgtggacgcaagatttcctcctagagtgccaaaatcttttccattcaacacctcagtcgtgtacaaaaagactctgtttgtagaattcacggatcaccttttcaacatcgctaagccaaggccaccctggatgggtctgctaggtcctaccatccaggctgaggtttatgatacagtggtcattacacttaagaacatggcttcccatcctgtcagtcttcatgctgttggtgtatcctactggaaagcttctgagggagctgaatatgatgatcagaccagtcaaagggagaaagaagatgataaagtcttccctggtggaagccatacatatgtctggcaggtcctgaaagagaatggtccaatggcctctgacccactgtgccttacctactcatatctttctcatgtggacctggtaaaagacttgaattcaggcctcattggagccctactagtatgtagagaagggagtctggccaaggaaaagacacagaccttgcacaaatttatactactttttgctgtatttgatgaagggaaaagttggcactcagaaacaaagaactccttgatgcaggatagggatgctgcatctgctcgggcctggcctaaaatgcacacagtcaatggttatgtaaacaggtctctgccaggtctgattggatgccacaggaaatcagtctattggcatgtgattggaatgggcaccactcctgaagtgcactcaatattcctcgaaggtcacacatttcttgtgaggaaccatcgccaggctagcttggaaatctcgccaataactttccttactgctcaaacactcttgatggaccttggacagtttctactgttttgtcatatctcttcccaccaacatgatggcatggaagcttatgtcaaagtagacagctgtccagaggaaccccaactacgaatgaaaaataatgaagaagcggaagactatgatgatgatcttactgattctgaaatggatgtggtcaggtttgatgatgacaactctccttcctttatccaaattcgctcagttgccaagaagcatcctaaaacttgggtacattacattgctgctgaagaggaggactgggactatgctcccttagtcctcgcccccgatgacagaagttataaaagtcaatatttgaacaatggccctcagcggattggtaggaagtacaaaaaagtccgatttatggcatacacagatgaaacctttaagactcgtgaagctattcagcatgaatcaggaatcttgggacctttactttatggggaagttggagacacactgttgattatatttaagaatcaagcaagcagaccatataacatctaccctcacggaatcactgatgtccgtcctttgtattcaaggagattaccaaaaggtgtaaaacatttgaaggattttccaattctgccaggagaaatattcaaatataaatggacagtgactgtagaagatgggccaactaaatcagatcctcggtgcctgacccgctattactctagtttcgttaatatggagagagatctagcttcaggactcattggccctctcctcatctgctacaaagaatctgtagatcaaagaggaaaccagataatgtcagacaagaggaatgtcatcctgttttctgtatttgatgagaaccgaagctggtacctcacagagaatatacaacgctttctccccaatccagctggagtgcagcttgaggatccagagttccaagcctccaacatcatgcacagcatcaatggctatgtttttgatagtttgcagttgtcagtttgtttgcatgaggtggcatactggtacattctaagcattggagcacagactgacttcctttctgtcttcttctctggatataccttcaaacacaaaatggtctatgaagacacactcaccctattcccattctcaggagaaactgtcttcatgtcgatggaaaacccaggtctatggattctggggtgccacaactcagactttcggaacagaggcatgaccgccttactgaaggtttctagttgtgacaagaacactggtgattattacgaggacagttatgaagatatttcagcatacttgctgagtaaaaacaatgccattgaaccaagaagcttctctcaaaacggcgcgccaagtcccgctggaagcccaactagcaccgaagaggggacctcagagtccgccacccccgagtccggccctggctctgagcctgccactagcggctccgagactcctggcacatccgaaagcgctacacccgagagtggacccggcacctctaccgagcccagtgagggctccgcccctggaacaagcaccgagcccagcgaaggcagcgccccagggacctccacagagcccagtgaaggcagtgctcctggcaccagcaccgaaccaagcgagggctctgcacccgggacctccaccgagccaagcgaaggctctgcccctggcacttccaccgagcccagcgaaggcagcgcccctgggagccccgctggctctcccaccagcactgaggagggcacatctaccgaaccaagtgaaggctctgcaccaggtgcctcgagcccaccagtcttgaaacgccatcaagctgaaataactcgtactactcttcagtcagatcaagaggaaatcgattatgatgataccatatcagttgaaatgaagaaggaagattttgacatttatgatgaggatgaaaatcagagcccccgcagctttcaaaagaaaacacgacactattttattgctgcagtggagaggctctgggattatgggatgagtagctccccacatgttctaagaaacagggctcagagtggcagtgtccctcagttcaagaaagttgttttccaggaatttactgatggctcctttactcagcccttataccgtggagaactaaatgaacatttgggactcctggggccatatataagagcagaagttgaagataatatcatggtaactttcagaaatcaggcctctcgtccctattccttctattctagccttatttcttatgaggaagatcagaggcaaggagcagaacctagaaaaaactttgtcaagcctaatgaaaccaaaacttacttttggaaagtgcaacatcatatggcacccactaaagatgagtttgactgcaaagcctgggcttatttctctgatgttgacctggaaaaagatgtgcactcaggcctgattggaccccttctggtctgccacactaacacactgaaccctgctcatgggagacaagtgacagtacaggaatttgctctgtttttcaccatctttgatgagaccaaaagctggtacttcactgaaaatatggaaagaaactgcaggggcgcgccaacgtccgaaagtgctacccctgagtcaggccctggtagtgagcctgccacaagcggaagcgaaactccggggacctcagagtctgccactcccgaatcggggccaggctctgaaccggccacttcagggagcgaaacaccaggaacatcggagagcgctaccccggagagcgggccaggaactagtactgagcctagcgagggaagtgcacctggtacaagcgagtccgccacacccgagtctggccctggctctccagcgggctcacccacgagcactgaagagggctctcccgctggcagcccaacgtcgacagaagaaggatcaccagcaggctcccccacatcaacagaggagggtacatcagaatctgctactcccgagagtggacccggtacctccactgagcccagcgaggggagtgcaccaggtgcctcgagcgctccctgcaatatccagatggaagatcccacttttaaagagaattatcgcttccatgcaatcaatggctacataatggatacactacctggcttagtaatggctcaggatcaaaggattcgatggtatctgctcagcatgggcagcaatgaaaacatccattctattcatttcagtggacatgtgttcactgtacgaaaaaaagaggagtataaaatggcactgtacaatctctatccaggtgtttttgagacagtggaaatgttaccatccaaagctggaatttggcgggtggaatgccttattggcgagcatctacatgctgggatgagcacactttttctggtgtacagcaataagtgtcagactcccctgggaatggcttctggacacattagagattttcagattacagcttcaggacaatatggacagtgggccccaaagctggccagacttcattattccggatcaatcaatgcctggagcaccaaggagcccttttcttggatcaaggtggatctgttggcaccaatgattattcacggcatcaagacccagggtgcccgtcagaagttctccagcctctacatctctcagtttatcatcatgtatagtcttgatgggaagaagtggcagacttatcgaggaaattccactggaaccttaatggtcttctttggcaatgtggattcatctgggataaaacacaatatttttaaccctccaattattgctcgatacatccgtttgcacccaactcattatagcattcgcagcactcttcgcatggagttgatgggctgtgatttaaatagttgcagcatgccattgggaatggagagtaaagcaatatcagatgcacagattactgcttcatcctactttaccaatatgtttgccacctggtctccttcaaaagctcgacttcacctccaagggaggagtaatgcctggagacctcaggtgaataatccaaaagagtggctgcaagtggacttccagaagacaatgaaagtcacaggagtaactactcagggagtaaaatctctgcttaccagcatgtatgtgaaggagttcctcatctccagcagtcaagatggccatcagtggactctcttttttcagaatggcaaagtaaaggtttttcagggaaatcaagactccttcacacctgtggtgaactctctagacccaccgttactgactcgctaccttcgaattcacccccagagttgggtgcaccagattgccctgaggatggaggttctgggctgcgaggcacaggacctctacggcgcgccaggtacctcagagtctgctacccccgagtcagggccaggatcagagccagccacctccgggtctgagacacccgggacttccgagagtgccacccctgagtccggacccgggtccgagcccgccacttccggctccgaaactcccggcacaagcgagagcgctaccccagagtcaggaccaggaacatctacagagccctctgaaggctccgctccagggtccccagccggcagtcccactagcaccgaggagggaacctctgaaagcgccacacccgaatcagggccagggtctgagcctgctaccagcggcagcgagacaccaggcacctctgagtccgccacaccagagtccggacccggatctcccgctgggagccccacctccactgaggagggatctcctgctggctctccaacatctactgaggaaggtacctcaaccgagccatccgagggatcagctcccggcacctcagagtcggcaaccccggagtctggacccggaacttccgaaagtgccacaccagagtccggtcccgggacttcagaatcagcaacacccgagtccggccctgggtctgaacccgccacaagtggtagtgagacaccaggatcagaacctgctacctcagggtcagagacacccggatctccggcaggctcaccaacctccactgaggagggcaccagcacagaaccaagcgagggctccgcacccggaacaagcactgaacccagtgagggttcagcacccggctctgagccggccacaagtggcagtgagacacccggcacttcagagagtgccacccccgagagtggcccaggcactagtaccgagccctctgaaggcagtgcgccagcctcgagcgaacaaaaactcatctcagaagaggatctgtcacctgcaaccggtcatcatcaccatcaccattga

SEQ ID NO: 1177 - protein, 2356 aa, synthetic construct
  REGION 1..2356: note = Description of Artificial Sequence: Synthetic polypeptide
ATRRYYLGAVELSWDYMQGAPGSSPSASTGTGPGSSPSASTGTGPGASPGTSSTGSPGASPGTSSTGSPGSSTPSGATGSPGSSPSASTGTGPGASPGTSSTGSPGSSPSASTGTGPGTPGSGTASSSPGSSTPSGATGSPGSSTPSGATGSPGASPGTSSTGSPASSSDLGELPVDARFPPRVPKSFPFNTSVVYKKTLFVEFTDHLFNIAKPRPPWMGLLGPTIQAEVYDTVVITLKNMASHPVSLHAVGVSYWKASEGAEYDDQTSQREKEDDKVFPGGSHTYVWQVLKENGPMASDPLCLTYSYLSHVDLVKDLNSGLIGALLVCREGSLAKEKTQTLHKFILLFAVFDEGKSWHSETKNSLMQDRDAASARAWPKMHTVNGYVNRSLPGLIGCHRKSVYWHVIGMGTTPEVHSIFLEGHTFLVRNHRQASLEISPITFLTAQTLLMDLGQFLLFCHISSHQHDGMEAYVKVDSCPEEPQLRMKNNEEAEDYDDDLTDSEMDVVRFDDDNSPSFIQIRSVAKKHPKTWVHYIAAEEEDWDYAPLVLAPDDRSYKSQYLNNGPQRIGRKYKKVRFMAYTDETFKTREAIQHESGILGPLLYGEVGDTLLIIFKNQASRPYNIYPHGITDVRPLYSRRLPKGVKHLKDFPILPGEIFKYKWTVTVEDGPTKSDPRCLTRYYSSFVNMERDLASGLIGPLLICYKESVDQRGNQIMSDKRNVILFSVFDENRSWYLTENIQRFLPNPAGVQLEDPEFQASNIMHSINGYVFDSLQLSVCLHEVAYWYILSIGAQTDFLSVFFSGYTFKHKMVYEDTLTLFPFSGETVFMSMENPGLWILGCHNSDFRNRGMTALLKVSSCDKNTGDYYEDSYEDISAYLLSKNNAIEPRSFSQNGAPSPAGSPTSTEEGTSESATPESGPGSEPATSGSETPGTSESATPESGPGTSTEPSEGSAPGTSTEPSEGSAPGTSTEPSEGSAPGTSTEPSEGSAPGTSTEPSEGSAPGTSTEPSEGSAPGSPAGSPTSTEEGTSTEPSEGSAPGASSPPVLKRHQAEITRTTLQSDQEEIDYDDTISVEMKKEDFDIYDEDENQSPRSFQKKTRHYFIAAVERLWDYGMSSSPHVLRNRAQGAPGTPGSGTASSSPGASPGTSSTGSPGASPGTSSTGSPGASPGTSSTGSPGSSPSASTGTGPGTPGSGTASSSPGASPGTSSTGSPGASPGTSSTGSPGASPGTSSTGSPGSSTPSGATGSPGSSTPSGATGSPGASPGTSSTGSPASSRAQSGSVPQFKKVVFQEFTDGSFTQPLYRGELNEHLGLLGPYIRAEVEDNIMVTFRNQASRPYSFYSSLISYEEDQRQGAEPRKNFVKPNETKTYFWKVQHHMAPTKDEFDCKAWAYFSDVDLEKDVHSGLIGPLLVCHTNTLNPAHGRQVTVQEFALFFTIFDETKSWYFTENMERNCRGAPTSESATPESGPGSEPATSGSETPGTSESATPESGPGSEPATSGSETPGTSESATPESGPGTSTEPSEGSAPGTSESATPESGPGSPAGSPTSTEEGSPAGSPTSTEEGSPAGSPTSTEEGTSESATPESGPGTSTEPSEGSAPGASSAPCNIQMEDPTFKENYRFHAINGYIMDTLPGLVMAQDQRIRWYLLSMGSNENIHSIHFSGHVFTVRKKEEYKMALYNLYPGVFETVEMLPSKAGIWRVECLIGEHLHAGMSTLFLVYSNKCQTPLGMASGHIRDFQITASGQYGQWAPKLARLHYSGSINAWSTKEPFSWIKVDLLAPMIIHGIKTQGARQKFSSLYISQFIIMYSLDGKKWQTYRGNSTGTLMVFFGNVDSSGIKHNIFNPPIIARYIRLHPTHYSIRSTLRMELMGCDLNSCSMPLGMESKAISDAQITASSYFTNMFATWSPSKARLHLQGRSNAWRPQVNNPKEWLQVDFQKTMKVTGVTTQGVKSLLTSMYVKEFLISSSQDGHQWTLFFQNGKVKVFQGNQDSFTPVVNSLDPPLLTRYLRIHPQSWVHQIALRMEVLGCEAQDLYGAPGTSESATPESGPGSEPATSGSETPGTSESATPESGPGSEPATSGSETPGTSESATPESGPGTSTEPSEGSAPGSPAGSPTSTEEGTSESATPESGPGSEPATSGSETPGTSESATPESGPGSPAGSPTSTEEGSPAGSPTSTEEGTSTEPSEGSAPGTSESATPESGPGTSESATPESGPGTSESATPESGPGSEPATSGSETPGSEPATSGSETPGSPAGSPTSTEEGTSTEPSEGSAPGTSTEPSEGSAPGSEPATSGSETPGTSESATPESGPGTSTEPSEGSAPASSEQKLISEEDLSPATGHHHHHH

SEQ ID NO: 1178 - DNA, 7071 bp, synthetic construct
  misc_feature 1..7071: note = Description of Artificial Sequence: Synthetic polynucleotide
  source 1..7071: mol_type = other DNA
gccaccagaagatactacctgggtgcagtggaactgtcatgggactatatgcaaggcgcgccaggctccagcccctccgcgagcacgggaaccggaccaggttcgtcaccctcagcatcaacggggacgggaccgggggcgtcaccaggaacgtcctccaccggctcgccgggtgcatcacccggaacgtcatcgaccggatcgccagggagctcgacgccatcaggcgcaacaggatcacctggctcaagccctagcgcgtcaaccggcacgggtccgggtgcctcccctggcacgtccagcaccggatcacccggatcgagcccatccgcctcaaccggaaccggacccggtacaccagggtcgggaacagcctcctcgtcaccaggctcctcaaccccctcgggagccacgggttcgcccggttcgtcaacgccttccggagcaactggtagccccggagcatcgccaggaacttcgagcacggggtcgcccgcctcgagcagtgatctcggtgagctgcctgtggacgcaagatttcctcctagagtgccaaaatcttttccattcaacacctcagtcgtgtacaaaaagactctgtttgtagaattcacggatcaccttttcaacatcgctaagccaaggccaccctggatgggtctgctaggtcctaccatccaggctgaggtttatgatacagtggtcattacacttaagaacatggcttcccatcctgtcagtcttcatgctgttggtgtatcctactggaaagcttctgagggagctgaatatgatgatcagaccagtcaaagggagaaagaagatgataaagtcttccctggtggaagccatacatatgtctggcaggtcctgaaagagaatggtccaatggcctctgacccactgtgccttacctactcatatctttctcatgtggacctggtaaaagacttgaattcaggcctcattggagccctactagtatgtagagaagggagtctggccaaggaaaagacacagaccttgcacaaatttatactactttttgctgtatttgatgaagggaaaagttggcactcagaaacaaagaactccttgatgcaggatagggatgctgcatctgctcgggcctggcctaaaatgcacacagtcaatggttatgtaaacaggtctctgccaggtctgattggatgccacaggaaatcagtctattggcatgtgattggaatgggcaccactcctgaagtgcactcaatattcctcgaaggtcacacatttcttgtgaggaaccatcgccaggctagcttggaaatctcgccaataactttccttactgctcaaacactcttgatggaccttggacagtttctactgttttgtcatatctcttcccaccaacatgatggcatggaagcttatgtcaaagtagacagctgtccagaggaaccccaactacgaatgaaaaataatgaagaagcggaagactatgatgatgatcttactgattctgaaatggatgtggtcaggtttgatgatgacaactctccttcctttatccaaattcgctcagttgccaagaagcatcctaaaacttgggtacattacattgctgctgaagaggaggactgggactatgctcccttagtcctcgcccccgatgacagaagttataaaagtcaatatttgaacaatggccctcagcggattggtaggaagtacaaaaaagtccgatttatggcatacacagatgaaacctttaagactcgtgaagctattcagcatgaatcaggaatcttgggacctttactttatggggaagttggagacacactgttgattatatttaagaatcaagcaagcagaccatataacatctaccctcacggaatcactgatgtccgtcctttgtattcaaggagattaccaaaaggtgtaaaacatttgaaggattttccaattctgccaggagaaatattcaaatataaatggacagtgactgtagaagatgggccaactaaatcagatcctcggtgcctgacccgctattactctagtttcgttaatatggagagagatctagcttcaggactcattggccctctcctcatctgctacaaagaatctgtagatcaaagaggaaaccagataatgtcagacaagaggaatgtcatcctgttttctgtatttgatgagaaccgaagctggtacctcacagagaatatacaacgctttctccccaatccagctggagtgcagcttgaggatccagagttccaagcctccaacatcatgcacagcatcaatggctatgtttttgatagtttgcagttgtcagtttgtttgcatgaggtggcatactggtacattctaagcattggagcacagactgacttcctttctgtcttcttctctggatataccttcaaacacaaaatggtctatgaagacacactcaccctattcccattctcaggagaaactgtcttcatgtcgatggaaaacccaggtctatggattctggggtgccacaactcagactttcggaacagaggcatgaccgccttactgaaggtttctagttgtgacaagaacactggtgattattacgaggacagttatgaagatatttcagcatacttgctgagtaaaaacaatgccattgaaccaagaagcttctctcaaaacggcgcgccaagtcccgctggaagcccaactagcaccgaagaggggacctcagagtccgccacccccgagtccggccctggctctgagcctgccactagcggctccgagactcctggcacatccgaaagcgctacacccgagagtggacccggcacctctaccgagcccagtgagggctccgcccctggaacaagcaccgagcccagcgaaggcagcgccccagggacctccacagagcccagtgaaggcagtgctcctggcaccagcaccgaaccaagcgagggctctgcacccgggacctccaccgagccaagcgaaggctctgcccctggcacttccaccgagcccagcgaaggcagcgcccctgggagccccgctggctctcccaccagcactgaggagggcacatctaccgaaccaagtgaaggctctgcaccaggtgcctcgagcccaccagtcttgaaacgccatcaagctgaaataactcgtactactcttcagtcagatcaagaggaaatcgattatgatgataccatatcagttgaaatgaagaaggaagattttgacatttatgatgaggatgaaaatcagagcccccgcagctttcaaaagaaaacacgacactattttattgctgcagtggagaggctctgggattatgggatgagtagctccccacatgttctaagaaacagggctcagggcgcgccaggtacacccggatcgggtacagcgtcatcgagccccggtgcgtcacctggtacgtcgagcacggggtcgccaggggcgtcccctgggacgtcctcaacaggctcgcccggtgcgtcacccggcacgtcgtccacgggttcacctggtagctccccttccgcgtccactggcaccgggcctggaactccggggagcggcacagcgagctcgtcgccgggagcatcgcctgggacatcgagcaccgggtcgccaggagcatcgcccggaacatccagcacaggaagccccggcgcgtcgcccgggacatcaagcacaggttccccgggatcgagcacgccgtccggagccactggatcaccagggagctcgacaccttccggcgcaacgggatcgcccggagccagcccgggtacgtcaagcactggctcccctgcctcgagcagggctcagagtggcagtgtccctcagttcaagaaagttgttttccaggaatttactgatggctcctttactcagcccttataccgtggagaactaaatgaacatttgggactcctggggccatatataagagcagaagttgaagataatatcatggtaactttcagaaatcaggcctctcgtccctattccttctattctagccttatttcttatgaggaagatcagaggcaaggagcagaacctagaaaaaactttgtcaagcctaatgaaaccaaaacttacttttggaaagtgcaacatcatatggcacccactaaagatgagtttgactgcaaagcctgggcttatttctctgatgttgacctggaaaaagatgtgcactcaggcctgattggaccccttctggtctgccacactaacacactgaaccctgctcatgggagacaagtgacagtacaggaatttgctctgtttttcaccatctttgatgagaccaaaagctggtacttcactgaaaatatggaaagaaactgcaggggcgcgccaacgtccgaaagtgctacccctgagtcaggccctggtagtgagcctgccacaagcggaagcgaaactccggggacctcagagtctgccactcccgaatcggggccaggctctgaaccggccacttcagggagcgaaacaccaggaacatcggagagcgctaccccggagagcgggccaggaactagtactgagcctagcgagggaagtgcacctggtacaagcgagtccgccacacccgagtctggccctggctctccagcgggctcacccacgagcactgaagagggctctcccgctggcagcccaacgtcgacagaagaaggatcaccagcaggctcccccacatcaacagaggagggtacatcagaatctgctactcccgagagtggacccggtacctccactgagcccagcgaggggagtgcaccaggtgcctcgagcgctccctgcaatatccagatggaagatcccacttttaaagagaattatcgcttccatgcaatcaatggctacataatggatacactacctggcttagtaatggctcaggatcaaaggattcgatggtatctgctcagcatgggcagcaatgaaaacatccattctattcatttcagtggacatgtgttcactgtacgaaaaaaagaggagtataaaatggcactgtacaatctctatccaggtgtttttgagacagtggaaatgttaccatccaaagctggaatttggcgggtggaatgccttattggcgagcatctacatgctgggatgagcacactttttctggtgtacagcaataagtgtcagactcccctgggaatggcttctggacacattagagattttcagattacagcttcaggacaatatggacagtgggccccaaagctggccagacttcattattccggatcaatcaatgcctggagcaccaaggagcccttttcttggatcaaggtggatctgttggcaccaatgattattcacggcatcaagacccagggtgcccgtcagaagttctccagcctctacatctctcagtttatcatcatgtatagtcttgatgggaagaagtggcagacttatcgaggaaattccactggaaccttaatggtcttctttggcaatgtggattcatctgggataaaacacaatatttttaaccctccaattattgctcgatacatccgtttgcacccaactcattatagcattcgcagcactcttcgcatggagttgatgggctgtgatttaaatagttgcagcatgccattgggaatggagagtaaagcaatatcagatgcacagattactgcttcatcctactttaccaatatgtttgccacctggtctccttcaaaagctcgacttcacctccaagggaggagtaatgcctggagacctcaggtgaataatccaaaagagtggctgcaagtggacttccagaagacaatgaaagtcacaggagtaactactcagggagtaaaatctctgcttaccagcatgtatgtgaaggagttcctcatctccagcagtcaagatggccatcagtggactctcttttttcagaatggcaaagtaaaggtttttcagggaaatcaagactccttcacacctgtggtgaactctctagacccaccgttactgactcgctaccttcgaattcacccccagagttgggtgcaccagattgccctgaggatggaggttctgggctgcgaggcacaggacctctacggcgcgccaggtacctcagagtctgctacccccgagtcagggccaggatcagagccagccacctccgggtctgagacacccgggacttccgagagtgccacccctgagtccggacccgggtccgagcccgccacttccggctccgaaactcccggcacaagcgagagcgctaccccagagtcaggaccaggaacatctacagagccctctgaaggctccgctccagggtccccagccggcagtcccactagcaccgaggagggaacctctgaaagcgccacacccgaatcagggccagggtctgagcctgctaccagcggcagcgagacaccaggcacctctgagtccgccacaccagagtccggacccggatctcccgctgggagccccacctccactgaggagggatctcctgctggctctccaacatctactgaggaaggtacctcaaccgagccatccgagggatcagctcccggcacctcagagtcggcaaccccggagtctggacccggaacttccgaaagtgccacaccagagtccggtcccgggacttcagaatcagcaacacccgagtccggccctgggtctgaacccgccacaagtggtagtgagacaccaggatcagaacctgctacctcagggtcagagacacccggatctccggcaggctcaccaacctccactgaggagggcaccagcacagaaccaagcgagggctccgcacccggaacaagcactgaacccagtgagggttcagcacccggctctgagccggccacaagtggcagtgagacacccggcacttcagagagtgccacccccgagagtggcccaggcactagtaccgagccctctgaaggcagtgcgccagcctcgagcgaacaaaaactcatctcagaagaggatctgtcacctgcaaccggtcatcatcaccatcaccattga

SEQ ID NO: 1179 - protein, 2506 aa, synthetic construct
  REGION 1..2506: note = Description of Artificial Sequence: Synthetic polypeptide
ATRRYYLGAVELSWDYMQGAPGSSPSASTGTGPGSSPSASTGTGPGASPGTSSTGSPGASPGTSSTGSPGSSTPSGATGSPGSSPSASTGTGPGASPGTSSTGSPGSSPSASTGTGPGTPGSGTASSSPGSSTPSGATGSPGSSTPSGATGSPGASPGTSSTGSPASSSDLGELPVDARFPPRVPKSFPFNTSVVYKKTLFVEFTDHLFNIAKPRPPWMGLLGPTIQAEVYDTVVITLKNMASHPVSLHAVGVSYWKASEGAEYDDQTSQREKEDDKVFPGGSHTYVWQVLKENGPMASDPLCLTYSYLSHVDLVKDLNSGLIGALLVCREGSLAKEKTQTLHKFILLFAVFDEGKSWHSETKNSLMQDRDAASARAWPKMHTVNGYVNRSLPGLIGCHRKSVYWHVIGMGTTPEVHSIFLEGHTFLVRNHRQASLEISPITFLTAQTLLMDLGQFLLFCHISSHQHDGMEAYVKVDSCPEEPQLRMKNNEEAEDYDDDLTDSEMDVVRFDDDNSPSFIQIRSVAKKHPKTWVHYIAAEEEDWDYAPLVLAPDGAPTSTEPSEGSAPGSPAGSPTSTEEGTSTEPSEGSAPGTSTEPSEGSAPGTSESATPESGPGTSTEPSEGSAPGTSESATPESGPGSEPATSGSETPGTSTEPSEGSAPGTSTEPSEGSAPGTSESATPESGPGTSESATPESGPGASSDRSYKSQYLNNGPQRIGRKYKKVRFMAYTDETFKTREAIQHESGILGPLLYGEVGDTLLIIFKNQASRPYNIYPHGITDVRPLYSRRLPKGVKHLKDFPILPGEIFKYKWTVTVEDGPTKSDPRCLTRYYSSFVNMERDLASGLIGPLLICYKESVDQRGNQIMSDKRNVILFSVFDENRSWYLTENIQRFLPNPAGVQLEDPEFQASNIMHSINGYVFDSLQLSVCLHEVAYWYILSIGAQTDFLSVFFSGYTFKHKMVYEDTLTLFPFSGETVFMSMENPGLWILGCHNSDFRNRGMTALLKVSSCDKNTGDYYEDSYEDISAYLLSKNNAIEPRSFSQNGAPSPAGSPTSTEEGTSESATPESGPGSEPATSGSETPGTSESATPESGPGTSTEPSEGSAPGTSTEPSEGSAPGTSTEPSEGSAPGTSTEPSEGSAPGTSTEPSEGSAPGTSTEPSEGSAPGSPAGSPTSTEEGTSTEPSEGSAPGASSPPVLKRHQAEITRTTLQSDQEEIDYDDTISVEMKKEDFDIYDEDENQSPRSFQKKTRHYFIAAVERLWDYGMSSSPHVLRNRAQGAPGTPGSGTASSSPGASPGTSSTGSPGASPGTSSTGSPGASPGTSSTGSPGSSPSASTGTGPGTPGSGTASSSPGASPGTSSTGSPGASPGTSSTGSPGASPGTSSTGSPGSSTPSGATGSPGSSTPSGATGSPGASPGTSSTGSPASSRAQSGSVPQFKKVVFQEFTDGSFTQPLYRGELNEHLGLLGPYIRAEVEDNIMVTFRNQASRPYSFYSSLISYEEDQRQGAEPRKNFVKPNETKTYFWKVQHHMAPTKDEFDCKAWAYFSDVDLEKDVHSGLIGPLLVCHTNTLNPAHGRQVTVQEFALFFTIFDETKSWYFTENMERNCRGAPTSESATPESGPGSEPATSGSETPGTSESATPESGPGSEPATSGSETPGTSESATPESGPGTSTEPSEGSAPGTSESATPESGPGSPAGSPTSTEEGSPAGSPTSTEEGSPAGSPTSTEEGTSESATPESGPGTSTEPSEGSAPGASSAPCNIQMEDPTFKENYRFHAINGYIMDTLPGLVMAQDQRIRWYLLSMGSNENIHSIHFSGHVFTVRKKEEYKMALYNLYPGVFETVEMLPSKAGIWRVECLIGEHLHAGMSTLFLVYSNKCQTPLGMASGHIRDFQITASGQYGQWAPKLARLHYSGSINAWSTKEPFSWIKVDLLAPMIIHGIKTQGARQKFSSLYISQFIIMYSLDGKKWQTYRGNSTGTLMVFFGNVDSSGIKHNIFNPPIIARYIRLHPTHYSIRSTLRMELMGCDLNSCSMPLGMESKAISDAQITASSYFTNMFATWSPSKARLHLQGRSNAWRPQVNNPKEWLQVDFQKTMKVTGVTTQGVKSLLTSMYVKEFLISSSQDGHQWTLFFQNGKVKVFQGNQDSFTPVVNSLDPPLLTRYLRIHPQSWVHQIALRMEVLGCEAQDLYGAPGTSESATPESGPGSEPATSGSETPGTSESATPESGPGSEPATSGSETPGTSESATPESGPGTSTEPSEGSAPGSPAGSPTSTEEGTSESATPESGPGSEPATSGSETPGTSESATPESGPGSPAGSPTSTEEGSPAGSPTSTEEGTSTEPSEGSAPGTSESATPESGPGTSESATPESGPGTSESATPESGPGSEPATSGSETPGSEPATSGSETPGSPAGSPTSTEEGTSTEPSEGSAPGTSTEPSEGSAPGSEPATSGSETPGTSESATPESGPGTSTEPSEGSAPASSEQKLISEEDLSPATGHHHHHH

SEQ ID NO: 1180 - DNA, 7521 bp, synthetic construct
  misc_feature 1..7521: note = Description of Artificial Sequence: Synthetic polynucleotide
  source 1..7521: mol_type = other DNA
gccaccagaagatactacctgggtgcagtggaactgtcatgggactatatgcaaggcgcgccaggctccagcccctccgcgagcacgggaaccggaccaggttcgtcaccctcagcatcaacggggacgggaccgggggcgtcaccaggaacgtcctccaccggctcgccgggtgcatcacccggaacgtcatcgaccggatcgccagggagctcgacgccatcaggcgcaacaggatcacctggctcaagccctagcgcgtcaaccggcacgggtccgggtgcctcccctggcacgtccagcaccggatcacccggatcgagcccatccgcctcaaccggaaccggacccggtacaccagggtcgggaacagcctcctcgtcaccaggctcctcaaccccctcgggagccacgggttcgcccggttcgtcaacgccttccggagcaactggtagccccggagcatcgccaggaacttcgagcacggggtcgcccgcctcgagcagtgatctcggtgagctgcctgtggacgcaagatttcctcctagagtgccaaaatcttttccattcaacacctcagtcgtgtacaaaaagactctgtttgtagaattcacggatcaccttttcaacatcgctaagccaaggccaccctggatgggtctgctaggtcctaccatccaggctgaggtttatgatacagtggtcattacacttaagaacatggcttcccatcctgtcagtcttcatgctgttggtgtatcctactggaaagcttctgagggagctgaatatgatgatcagaccagtcaaagggagaaagaagatgataaagtcttccctggtggaagccatacatatgtctggcaggtcctgaaagagaatggtccaatggcctctgacccactgtgccttacctactcatatctttctcatgtggacctggtaaaagacttgaattcaggcctcattggagccctactagtatgtagagaagggagtctggccaaggaaaagacacagaccttgcacaaatttatactactttttgctgtatttgatgaagggaaaagttggcactcagaaacaaagaactccttgatgcaggatagggatgctgcatctgctcgggcctggcctaaaatgcacacagtcaatggttatgtaaacaggtctctgccaggtctgattggatgccacaggaaatcagtctattggcatgtgattggaatgggcaccactcctgaagtgcactcaatattcctcgaaggtcacacatttcttgtgaggaaccatcgccaggctagcttggaaatctcgccaataactttccttactgctcaaacactcttgatggaccttggacagtttctactgttttgtcatatctcttcccaccaacatgatggcatggaagcttatgtcaaagtagacagctgtccagaggaaccccaactacgaatgaaaaataatgaagaagcggaagactatgatgatgatcttactgattctgaaatggatgtggtcaggtttgatgatgacaactctccttcctttatccaaattcgctcagttgccaagaagcatcctaaaacttgggtacattacattgctgctgaagaggaggactgggactatgctcccttagtcctcgcccccgatggcgcgccaaccagtacggagccgtccgaggggagcgcaccaggaagcccggctgggagcccgacttctaccgaagagggtacatctaccgaaccaagtgaaggttcagcaccaggcacctcaacagaaccctctgagggctcggcgcctggtacaagtgagtccgccaccccagaatccgggcctgggacaagcacagaaccttcggaagggagtgcccctggaacatccgaatcggcaaccccagaatcagggccaggatctgagcccgcgacttcgggctccgagacgcctgggacatccaccgagccctccgaaggatcagccccaggcaccagcacggagccctctgagggaagcgcacctggtaccagcgaaagcgcaactcccgaatcaggtcccggtacgagcgagtcggcgaccccggagagcgggccaggtgcctcgagcgacagaagttataaaagtcaatatttgaacaatggccctcagcggattggtaggaagtacaaaaaagtccgatttatggcatacacagatgaaacctttaagactcgtgaagctattcagcatgaatcaggaatcttgggacctttactttatggggaagttggagacacactgttgattatatttaagaatcaagcaagcagaccatataacatctaccctcacggaatcactgatgtccgtcctttgtattcaaggagattaccaaaaggtgtaaaacatttgaaggattttccaattctgccaggagaaatattcaaatataaatggacagtgactgtagaagatgggccaactaaatcagatcctcggtgcctgacccgctattactctagtttcgttaatatggagagagatctagcttcaggactcattggccctctcctcatctgctacaaagaatctgtagatcaaagaggaaaccagataatgtcagacaagaggaatgtcatcctgttttctgtatttgatgagaaccgaagctggtacctcacagagaatatacaacgctttctccccaatccagctggagtgcagcttgaggatccagagttccaagcctccaacatcatgcacagcatcaatggctatgtttttgatagtttgcagttgtcagtttgtttgcatgaggtggcatactggtacattctaagcattggagcacagactgacttcctttctgtcttcttctctggatataccttcaaacacaaaatggtctatgaagacacactcaccctattcccattctcaggagaaactgtcttcatgtcgatggaaaacccaggtctatggattctggggtgccacaactcagactttcggaacagaggcatgaccgccttactgaaggtttctagttgtgacaagaacactggtgattattacgaggacagttatgaagatatttcagcatacttgctgagtaaaaacaatgccattgaaccaagaagcttctctcaaaacggcgcgccaagtcccgctggaagcccaactagcaccgaagaggggacctcagagtccgccacccccgagtccggccctggctctgagcctgccactagcggctccgagactcctggcacatccgaaagcgctacacccgagagtggacccggcacctctaccgagcccagtgagggctccgcccctggaacaagcaccgagcccagcgaaggcagcgccccagggacctccacagagcccagtgaaggcagtgctcctggcaccagcaccgaaccaagcgagggctctgcacccgggacctccaccgagccaagcgaaggctctgcccctggcacttccaccgagcccagcgaaggcagcgcccctgggagccccgctggctctcccaccagcactgaggagggcacatctaccgaaccaagtgaaggctctgcaccaggtgcctcgagcccaccagtcttgaaacgccatcaagctgaaataactcgtactactcttcagtcagatcaagaggaaatcgattatgatgataccatatcagttgaaatgaagaaggaagattttgacatttatgatgaggatgaaaatcagagcccccgcagctttcaaaagaaaacacgacactattttattgctgcagtggagaggctctgggattatgggatgagtagctccccacatgttctaagaaacagggctcagggcgcgccaggtacacccggatcgggtacagcgtcatcgagccccggtgcgtcacctggtacgtcgagcacggggtcgccaggggcgtcccctgggacgtcctcaacaggctcgcccggtgcgtcacccggcacgtcgtccacgggttcacctggtagctccccttccgcgtccactggcaccgggcctggaactccggggagcggcacagcgagctcgtcgccgggagcatcgcctgggacatcgagcaccgggtcgccaggagcatcgcccggaacatccagcacaggaagccccggcgcgtcgcccgggacatcaagcacaggttccccgggatcgagcacgccgtccggagccactggatcaccagggagctcgacaccttccggcgcaacgggatcgcccggagccagcccgggtacgtcaagcactggctcccctgcctcgagcagggctcagagtggcagtgtccctcagttcaagaaagttgttttccaggaatttactgatggctcctttactcagcccttataccgtggagaactaaatgaacatttgggactcctggggccatatataagagcagaagttgaagataatatcatggtaactttcagaaatcaggcctctcgtccctattccttctattctagccttatttcttatgaggaagatcagaggcaaggagcagaacctagaaaaaactttgtcaagcctaatgaaaccaaaacttacttttggaaagtgcaacatcatatggcacccactaaagatgagtttgactgcaaagcctgggcttatttctctgatgttgacctggaaaaagatgtgcactcaggcctgattggaccccttctggtctgccacactaacacactgaaccctgctcatgggagacaagtgacagtacaggaatttgctctgtttttcaccatctttgatgagaccaaaagctggtacttcactgaaaatatggaaagaaactgcaggggcgcgccaacgtccgaaagtgctacccctgagtcaggccctggtagtgagcctgccacaagcggaagcgaaactccggggacctcagagtctgccactcccgaatcggggccaggctctgaaccggccacttcagggagcgaaacaccaggaacatcggagagcgctaccccggagagcgggccaggaactagtactgagcctagcgagggaagtgcacctggtacaagcgagtccgccacacccgagtctggccctggctctccagcgggctcacccacgagcactgaagagggctctcccgctggcagcccaacgtcgacagaagaaggatcaccagcaggctcccccacatcaacagaggagggtacatcagaatctgctactcccgagagtggacccggtacctccactgagcccagcgaggggagtgcaccaggtgcctcgagcgctccctgcaatatccagatggaagatcccacttttaaagagaattatcgcttccatgcaatcaatggctacataatggatacactacctggcttagtaatggctcaggatcaaaggattcgatggtatctgctcagcatgggcagcaatgaaaacatccattctattcatttcagtggacatgtgttcactgtacgaaaaaaagaggagtataaaatggcactgtacaatctctatccaggtgtttttgagacagtggaaatgttaccatccaaagctggaatttggcgggtggaatgccttattggcgagcatctacatgctgggatgagcacactttttctggtgtacagcaataagtgtcagactcccctgggaatggcttctggacacattagagattttcagattacagcttcaggacaatatggacagtgggccccaaagctggccagacttcattattccggatcaatcaatgcctggagcaccaaggagcccttttcttggatcaaggtggatctgttggcaccaatgattattcacggcatcaagacccagggtgcccgtcagaagttctccagcctctacatctctcagtttatcatcatgtatagtcttgatgggaagaagtggcagacttatcgaggaaattccactggaaccttaatggtcttctttggcaatgtggattcatctgggataaaacacaatatttttaaccctccaattattgctcgatacatccgtttgcacccaactcattatagcattcgcagcactcttcgcatggagttgatgggctgtgatttaaatagttgcagcatgccattgggaatggagagtaaagcaatatcagatgcacagattactgcttcatcctactttaccaatatgtttgccacctggtctccttcaaaagctcgacttcacctccaagggaggagtaatgcctggagacctcaggtgaataatccaaaagagtggctgcaagtggacttccagaagacaatgaaagtcacaggagtaactactcagggagtaaaatctctgcttaccagcatgtatgtgaaggagttcctcatctccagcagtcaagatggccatcagtggactctcttttttcagaatggcaaagtaaaggtttttcagggaaatcaagactccttcacacctgtggtgaactctctagacccaccgttactgactcgctaccttcgaattcacccccagagttgggtgcaccagattgccctgaggatggaggttctgggctgcgaggcacaggacctctacggcgcgccaggtacctcagagtctgctacccccgagtcagggccaggatcagagccagccacctccgggtctgagacacccgggacttccgagagtgccacccctgagtccggacccgggtccgagcccgccacttccggctccgaaactcccggcacaagcgagagcgctaccccagagtcaggaccaggaacatctacagagccctctgaaggctccgctccagggtccccagccggcagtcccactagcaccgaggagggaacctctgaaagcgccacacccgaatcagggccagggtctgagcctgctaccagcggcagcgagacaccaggcacctctgagtccgccacaccagagtccggacccggatctcccgctgggagccccacctccactgaggagggatctcctgctggctctccaacatctactgaggaaggtacctcaaccgagccatccgagggatcagctcccggcacctcagagtcggcaaccccggagtctggacccggaacttccgaaagtgccacaccagagtccggtcccgggacttcagaatcagcaacacccgagtccggccctgggtctgaacccgccacaagtggtagtgagacaccaggatcagaacctgctacctcagggtcagagacacccggatctccggcaggctcaccaacctccactgaggagggcaccagcacagaaccaagcgagggctccgcacccggaacaagcactgaacccagtgagggttcagcacccggctctgagccggccacaagtggcagtgagacacccggcacttcagagagtgccacccccgagagtggcccaggcactagtaccgagccctctgaaggcagtgcgccagcctcgagcgaacaaaaactcatctcagaagaggatctgtcacctgcaaccggtcatcatcaccatcaccattga

SEQ ID NO: 1181 - protein, 2203 aa, synthetic construct
  REGION 1..2203: note = Description of Artificial Sequence: Synthetic polypeptide
ATRRYYLGAVELSWDYMQSDLGELPVDARFPPRVPKSFPFNTSVVYKKTLFVEFTDHLFNIAKPRPPWMGLLGPTIQAEVYDTVVITLKNMASHPVSLHAVGVSYWKASEGAEYDDQTSQREKEDDKVFPGGSHTYVWQVLKENGPMASDPLCLTYSYLSHVDLVKDLNSGLIGALLVCREGSLAKEKTQTLHKFILLFAVFDEGKSWHSETKNSLMQDRDAASARAWPKMHTVNGYVNRSLPGLIGCHRKSVYWHVIGMGTTPEVHSIFLEGHTFLVRNHRQASLEISPITFLTAQTLLMDLGQFLLFCHISSHQHDGMEAYVKVDSCPEEPQLRMKNNEEAEDYDDDLTDSEMDVVRFDDDNSPSFIQIRSVAKKHPKTWVHYIAAEEEDWDYAPLVLAPDGAPTSTEPSEGSAPGSPAGSPTSTEEGTSTEPSEGSAPGTSTEPSEGSAPGTSESATPESGPGTSTEPSEGSAPGTSESATPESGPGSEPATSGSETPGTSTEPSEGSAPGTSTEPSEGSAPGTSESATPESGPGTSESATPESGPGASSDRSYKSQYLNNGPQRIGRKYKKVRFMAYTDETFKTREAIQHESGILGPLLYGEVGDTLLIIFKNQASRPYNIYPHGITDVRPLYSRRLPKGVKHLKDFPILPGEIFKYKWTVTVEDGPTKSDPRCLTRYYSSFVNMERDLASGLIGPLLICYKESVDQRGNQIMSDKRNVILFSVFDENRSWYLTENIQRFLPNPAGVQLEDPEFQASNIMHSINGYVFDSLQLSVCLHEVAYWYILSIGAQTDFLSVFFSGYTFKHKMVYEDTLTLFPFSGETVFMSMENPGLWILGCHNSDFRNRGMTALLKVSSCDKNTGDYYEDSYEDISAYLLSKNNAIEPRSFSQNGAPSPAGSPTSTEEGTSESATPESGPGSEPATSGSETPGTSESATPESGPGTSTEPSEGSAPGTSTEPSEGSAPGTSTEPSEGSAPGTSTEPSEGSAPGTSTEPSEGSAPGTSTEPSEGSAPGSPAGSPTSTEEGTSTEPSEGSAPGASSPPVLKRHQAEITRTTLQSDQEEIDYDDTISVEMKKEDFDIYDEDENQSPRSFQKKTRHYFIAAVERLWDYGMSSSPHVLRNRAQSGSVPQFKKVVFQEFTDGSFTQPLYRGELNEHLGLLGPYIRAEVEDNIMVTFRNQASRPYSFYSSLISYEEDQRQGAEPRKNFVKPNETKTYFWKVQHHMAPTKDEFDCKAWAYFSDVDLEKDVHSGLIGPLLVCHTNTLNPAHGRQVTVQEFALFFTIFDETKSWYFTENMERNCRGAPTSESATPESGPGSEPATSGSETPGTSESATPESGPGSEPATSGSETPGTSESATPESGPGTSTEPSEGSAPGTSESATPESGPGSPAGSPTSTEEGSPAGSPTSTEEGSPAGSPTSTEEGTSESATPESGPGTSTEPSEGSAPGASSAPCNIQMEDPTFKENYRFHAINGYIMDTLPGLVMAQDQRIRWYLLSMGSNENIHSIHFSGHVFTVRKKEEYKMALYNLYPGVFETVEMLPSKAGIWRVECLIGEHLHAGMSTLFLVYSNKCQTPLGMASGHIRDFQITASGQYGQWAPKLARLHYSGSINAWSTKEPFSWIKVDLLAPMIIHGIKTQGARQKFSSLYISQFIIMYSLDGKKWQTYRGNSTGTLMVFFGNVDSSGIKHNIFNPPIIARYIRLHPTHYSIRSTLRMELMGCDLNSCSMPLGMESKAISDAQITASSYFTNMFATWSPSKARLHLQGRSNAWRPQVNNPKEWLQVDFQKTMKVTGVTTQGVKSLLTSMYVKEFLISSSQDGHQWTLFFQNGKVKVFQGNQDSFTPVVNSLDPPLLTRYLRIHPQSWVHQIALRMEVLGCEAQDLYGAPGTSESATPESGPGSEPATSGSETPGTSESATPESGPGSEPATSGSETPGTSESATPESGPGTSTEPSEGSAPGSPAGSPTSTEEGTSESATPESGPGSEPATSGSETPGTSESATPESGPGSPAGSPTSTEEGSPAGSPTSTEEGTSTEPSEGSAPGTSESATPESGPGTSESATPESGPGTSESATPESGPGSEPATSGSETPGSEPATSGSETPGSPAGSPTSTEEGTSTEPSEGSAPGTSTEPSEGSAPGSEPATSGSETPGTSESATPESGPGTSTEPSEGSAPASSEQKLISEEDLSPATGHHHHHH

SEQ ID NO: 1182 - DNA, 6612 bp, synthetic construct
  misc_feature 1..6612: note = Description of Artificial Sequence: Synthetic polynucleotide
  source 1..6612: mol_type = other DNA
gccaccagaagatactacctgggtgcagtggaactgtcatgggactatatgcaaagtgatctcggtgagctgcctgtggacgcaagatttcctcctagagtgccaaaatcttttccattcaacacctcagtcgtgtacaaaaagactctgtttgtagaattcacggatcaccttttcaacatcgctaagccaaggccaccctggatgggtctgctaggtcctaccatccaggctgaggtttatgatacagtggtcattacacttaagaacatggcttcccatcctgtcagtcttcatgctgttggtgtatcctactggaaagcttctgagggagctgaatatgatgatcagaccagtcaaagggagaaagaagatgataaagtcttccctggtggaagccatacatatgtctggcaggtcctgaaagagaatggtccaatggcctctgacccactgtgccttacctactcatatctttctcatgtggacctggtaaaagacttgaattcaggcctcattggagccctactagtatgtagagaagggagtctggccaaggaaaagacacagaccttgcacaaatttatactactttttgctgtatttgatgaagggaaaagttggcactcagaaacaaagaactccttgatgcaggatagggatgctgcatctgctcgggcctggcctaaaatgcacacagtcaatggttatgtaaacaggtctctgccaggtctgattggatgccacaggaaatcagtctattggcatgtgattggaatgggcaccactcctgaagtgcactcaatattcctcgaaggtcacacatttcttgtgaggaaccatcgccaggctagcttggaaatctcgccaataactttccttactgctcaaacactcttgatggaccttggacagtttctactgttttgtcatatctcttcccaccaacatgatggcatggaagcttatgtcaaagtagacagctgtccagaggaaccccaactacgaatgaaaaataatgaagaagcggaagactatgatgatgatcttactgattctgaaatggatgtggtcaggtttgatgatgacaactctccttcctttatccaaattcgctcagttgccaagaagcatcctaaaacttgggtacattacattgctgctgaagaggaggactgggactatgctcccttagtcctcgcccccgatggcgcgccaaccagtacggagccgtccgaggggagcgcaccaggaagcccggctgggagcccgacttctaccgaagagggtacatctaccgaaccaagtgaaggttcagcaccaggcacctcaacagaaccctctgagggctcggcgcctggtacaagtgagtccgccaccccagaatccgggcctgggacaagcacagaaccttcggaagggagtgcccctggaacatccgaatcggcaaccccagaatcagggccaggatctgagcccgcgacttcgggctccgagacgcctgggacatccaccgagccctccgaaggatcagccccaggcaccagcacggagccctctgagggaagcgcacctggtaccagcgaaagcgcaactcccgaatcaggtcccggtacgagcgagtcggcgaccccggagagcgggccaggtgcctcgagcgacagaagttataaaagtcaatatttgaacaatggccctcagcggattggtaggaagtacaaaaaagtccgatttatggcatacacagatgaaacctttaagactcgtgaagctattcagcatgaatcaggaatcttgggacctttactttatggggaagttggagacacactgttgattatatttaagaatcaagcaagcagaccatataacatctaccctcacggaatcactgatgtccgtcctttgtattcaaggagattaccaaaaggtgtaaaacatttgaaggattttccaattctgccaggagaaatattcaaatataaatggacagtgactgtagaagatgggccaactaaatcagatcctcggtgcctgacccgctattactctagtttcgttaatatggagagagatctagcttcaggactcattggccctctcctcatctgctacaaagaatctgtagatcaaagaggaaaccagataatgtcagacaagaggaatgtcatcctgttttctgtatttgatgagaaccgaagctggtacctcacagagaatatacaacgctttctccccaatccagctggagtgcagcttgaggatccagagttccaagcctccaacatcatgcacagcatcaatggctatgtttttgatagtttgcagttgtcagtttgtttgcatgaggtggcatactggtacattctaagcattggagcacagactgacttcctttctgtcttcttctctggatataccttcaaacacaaaatggtctatgaagacacactcaccctattcccattctcaggagaaactgtcttcatgtcgatggaaaacccaggtctatggattctggggtgccacaactcagactttcggaacagaggcatgaccgccttactgaaggtttctagttgtgacaagaacactggtgattattacgaggacagttatgaagatatttcagcatacttgctgagtaaaaacaatgccattgaaccaagaagcttctctcaaaacggcgcgccaagtcccgctggaagcccaactagcaccgaagaggggacctcagagtccgccacccccgagtccggccctggctctgagcctgccactagcggctccgagactcctggcacatccgaaagcgctacacccgagagtggacccggcacctctaccgagcccagtgagggctccgcccctggaacaagcaccgagcccagcgaaggcagcgccccagggacctccacagagcccagtgaaggcagtgctcctggcaccagcaccgaaccaagcgagggctctgcacccgggacctccaccgagccaagcgaaggctctgcccctggcacttccaccgagcccagcgaaggcagcgcccctgggagccccgctggctctcccaccagcactgaggagggcacatctaccgaaccaagtgaaggctctgcaccaggtgcctcgagcccaccagtcttgaaacgccatcaagctgaaataactcgtactactcttcagtcagatcaagaggaaatcgattatgatgataccatatcagttgaaatgaagaaggaagattttgacatttatgatgaggatgaaaatcagagcccccgcagctttcaaaagaaaacacgacactattttattgctgcagtggagaggctctgggattatgggatgagtagctccccacatgttctaagaaacagggctcagagtggcagtgtccctcagttcaagaaagttgttttccaggaatttactgatggctcctttactcagcccttataccgtggagaactaaatgaacatttgggactcctggggccatatataagagcagaagttgaagataatatcatggtaactttcagaaatcaggcctctcgtccctattccttctattctagccttatttcttatgaggaagatcagaggcaaggagcagaacctagaaaaaactttgtcaagcctaatgaaaccaaaacttacttttggaaagtgcaacatcatatggcacccactaaagatgagtttgactgcaaagcctgggcttatttctctgatgttgacctggaaaaagatgtgcactcaggcctgattggaccccttctggtctgccacactaacacactgaaccctgctcatgggagacaagtgacagtacaggaatttgctctgtttttcaccatctttgatgagaccaaaagctggtacttcactgaaaatatggaaagaaactgcaggggcgcgccaacgtccgaaagtgctacccctgagtcaggccctggtagtgagcctgccacaagcggaagcgaaactccggggacctcagagtctgccactcccgaatcggggccaggctctgaaccggccacttcagggagcgaaacaccaggaacatcggagagcgctaccccggagagcgggccaggaactagtactgagcctagcgagggaagtgcacctggtacaagcgagtccgccacacccgagtctggccctggctctccagcgggctcacccacgagcactgaagagggctctcccgctggcagcccaacgtcgacagaagaaggatcaccagcaggctcccccacatcaacagaggagggtacatcagaatctgctactcccgagagtggacccggtacctccactgagcccagcgaggggagtgcaccaggtgcctcgagcgctccctgcaatatccagatggaagatcccacttttaaagagaattatcgcttccatgcaatcaatggctacataatggatacactacctggcttagtaatggctcaggatcaaaggattcgatggtatctgctcagcatgggcagcaatgaaaacatccattctattcatttcagtggacatgtgttcactgtacgaaaaaaagaggagtataaaatggcactgtacaatctctatccaggtgtttttgagacagtggaaatgttaccatccaaagctggaatttggcgggtggaatgccttattggcgagcatctacatgctgggatgagcacactttttctggtgtacagcaataagtgtcagactcccctgggaatggcttctggacacattagagattttcagattacagcttcaggacaatatggacagtgggccccaaagctggccagacttcattattccggatcaatcaatgcctggagcaccaaggagcccttttcttggatcaaggtggatctgttggcaccaatgattattcacggcatcaagacccagggtgcccgtcagaagttctccagcctctacatctctcagtttatcatcatgtatagtcttgatgggaagaagtggcagacttatcgaggaaattccactggaaccttaatggtcttctttggcaatgtggattcatctgggataaaacacaatatttttaaccctccaattattgctcgatacatccgtttgcacccaactcattatagcattcgcagcactcttcgcatggagttgatgggctgtgatttaaatagttgcagcatgccattgggaatggagagtaaagcaatatcagatgcacagattactgcttcatcctactttaccaatatgtttgccacctggtctccttcaaaagctcgacttcacctccaagggaggagtaatgcctggagacctcaggtgaataatccaaaagagtggctgcaagtggacttccagaagacaatgaaagtcacaggagtaactactcagggagtaaaatctctgcttaccagcatgtatgtgaaggagttcctcatctccagcagtcaagatggccatcagtggactctcttttttcagaatggcaaagtaaaggtttttcagggaaatcaagactccttcacacctgtggtgaactctctagacccaccgttactgactcgctaccttcgaattcacccccagagttgggtgcaccagattgccctgaggatggaggttctgggctgcgaggcacaggacctctacggcgcgccaggtacctcagagtctgctacccccgagtcagggccaggatcagagccagccacctccgggtctgagacacccgggacttccgagagtgccacccctgagtccggacccgggtccgagcccgccacttccggctccgaaactcccggcacaagcgagagcgctaccccagagtcaggaccaggaacatctacagagccctctgaaggctccgctccagggtccccagccggcagtcccactagcaccgaggagggaacctctgaaagcgccacacccgaatcagggccagggtctgagcctgctaccagcggcagcgagacaccaggcacctctgagtccgccacaccagagtccggacccggatctcccgctgggagccccacctccactgaggagggatctcctgctggctctccaacatctactgaggaaggtacctcaaccgagccatccgagggatcagctcccggcacctcagagtcggcaaccccggagtctggacccggaacttccgaaagtgccacaccagagtccggtcccgggacttcagaatcagcaacacccgagtccggccctgggtctgaacccgccacaagtggtagtgagacaccaggatcagaacctgctacctcagggtcagagacacccggatctccggcaggctcaccaacctccactgaggagggcaccagcacagaaccaagcgagggctccgcacccggaacaagcactgaacccagtgagggttcagcacccggctctgagccggccacaagtggcagtgagacacccggcacttcagagagtgccacccccgagagtggcccaggcactagtaccgagccctctgaaggcagtgcgccagcctcgagcgaacaaaaactcatctcagaagaggatctgtcacctgcaaccggtcatcatcaccatcaccattga

SEQ ID NO: 1183 - protein, 2356 aa, synthetic construct
  REGION 1..2356: note = Description of Artificial Sequence: Synthetic polypeptide
ATRRYYLGAVELSWDYMQSDLGELPVDARFPPRVPKSFPFNTSVVYKKTLFVEFTDHLFNIAKPRPPWMGLLGPTIQAEVYDTVVITLKNMASHPVSLHAVGVSYWKASEGAEYDDQTSQREKEDDKVFPGGSHTYVWQVLKENGPMASDPLCLTYSYLSHVDLVKDLNSGLIGALLVCREGSLAKEKTQTLHKFILLFAVFDEGKSWHSETKNSLMQDRDAASARAWPKMHTVNGYVNRSLPGLIGCHRKSVYWHVIGMGTTPEVHSIFLEGHTFLVRNHRQASLEISPITFLTAQTLLMDLGQFLLFCHISSHQHDGMEAYVKVDSCPEEPQLRMKNNEEAEDYDDDLTDSEMDVVRFDDDNSPSFIQIRSVAKKHPKTWVHYIAAEEEDWDYAPLVLAPDGAPTSTEPSEGSAPGSPAGSPTSTEEGTSTEPSEGSAPGTSTEPSEGSAPGTSESATPESGPGTSTEPSEGSAPGTSESATPESGPGSEPATSGSETPGTSTEPSEGSAPGTSTEPSEGSAPGTSESATPESGPGTSESATPESGPGASSDRSYKSQYLNNGPQRIGRKYKKVRFMAYTDETFKTREAIQHESGILGPLLYGEVGDTLLIIFKNQASRPYNIYPHGITDVRPLYSRRLPKGVKHLKDFPILPGEIFKYKWTVTVEDGPTKSDPRCLTRYYSSFVNMERDLASGLIGPLLICYKESVDQRGNQIMSDKRNVILFSVFDENRSWYLTENIQRFLPNPAGVQLEDPEFQASNIMHSINGYVFDSLQLSVCLHEVAYWYILSIGAQTDFLSVFFSGYTFKHKMVYEDTLTLFPFSGETVFMSMENPGLWILGCHNSDFRNRGMTALLKVSSCDKNTGDYYEDSYEDISAYLLSKNNAIEPRSFSQNGAPSPAGSPTSTEEGTSESATPESGPGSEPATSGSETPGTSESATPESGPGTSTEPSEGSAPGTSTEPSEGSAPGTSTEPSEGSAPGTSTEPSEGSAPGTSTEPSEGSAPGTSTEPSEGSAPGSPAGSPTSTEEGTSTEPSEGSAPGASSPPVLKRHQAEITRTTLQSDQEEIDYDDTISVEMKKEDFDIYDEDENQSPRSFQKKTRHYFIAAVERLWDYGMSSSPHVLRNRAQGAPGTPGSGTASSSPGASPGTSSTGSPGASPGTSSTGSPGASPGTSSTGSPGSSPSASTGTGPGTPGSGTASSSPGASPGTSSTGSPGASPGTSSTGSPGASPGTSSTGSPGSSTPSGATGSPGSSTPSGATGSPGASPGTSSTGSPASSRAQSGSVPQFKKVVFQEFTDGSFTQPLYRGELNEHLGLLGPYIRAEVEDNIMVTFRNQASRPYSFYSSLISYEEDQRQGAEPRKNFVKPNETKTYFWKVQHHMAPTKDEFDCKAWAYFSDVDLEKDVHSGLIGPLLVCHTNTLNPAHGRQVTVQEFALFFTIFDETKSWYFTENMERNCRGAPTSESATPESGPGSEPATSGSETPGTSESATPESGPGSEPATSGSETPGTSESATPESGPGTSTEPSEGSAPGTSESATPESGPGSPAGSPTSTEEGSPAGSPTSTEEGSPAGSPTSTEEGTSESATPESGPGTSTEPSEGSAPGASSAPCNIQMEDPTFKENYRFHAINGYIMDTLPGLVMAQDQRIRWYLLSMGSNENIHSIHFSGHVFTVRKKEEYKMALYNLYPGVFETVEMLPSKAGIWRVECLIGEHLHAGMSTLFLVYSNKCQTPLGMASGHIRDFQITASGQYGQWAPKLARLHYSGSINAWSTKEPFSWIKVDLLAPMIIHGIKTQGARQKFSSLYISQFIIMYSLDGKKWQTYRGNSTGTLMVFFGNVDSSGIKHNIFNPPIIARYIRLHPTHYSIRSTLRMELMGCDLNSCSMPLGMESKAISDAQITASSYFTNMFATWSPSKARLHLQGRSNAWRPQVNNPKEWLQVDFQKTMKVTGVTTQGVKSLLTSMYVKEFLISSSQDGHQWTLFFQNGKVKVFQGNQDSFTPVVNSLDPPLLTRYLRIHPQSWVHQIALRMEVLGCEAQDLYGAPGTSESATPESGPGSEPATSGSETPGTSESATPESGPGSEPATSGSETPGTSESATPESGPGTSTEPSEGSAPGSPAGSPTSTEEGTSESATPESGPGSEPATSGSETPGTSESATPESGPGSPAGSPTSTEEGSPAGSPTSTEEGTSTEPSEGSAPGTSESATPESGPGTSESATPESGPGTSESATPESGPGSEPATSGSETPGSEPATSGSETPGSPAGSPTSTEEGTSTEPSEGSAPGTSTEPSEGSAPGSEPATSGSETPGTSESATPESGPGTSTEPSEGSAPASSEQKLISEEDLSPATGHHHHHH

SEQ ID NO: 1184 - DNA, 7071 bp, synthetic construct
  misc_feature 1..7071: note = Description of Artificial Sequence: Synthetic polynucleotide
  source 1..7071: mol_type = other DNA
gccaccagaagatactacctgggtgcagtggaactgtcatgggactatatgcaaagtgatctcggtgagctgcctgtggacgcaagatttcctcctagagtgccaaaatcttttccattcaacacctcagtcgtgtacaaaaagactctgtttgtagaattcacggatcaccttttcaacatcgctaagccaaggccaccctggatgggtctgctaggtcctaccatccaggctgaggtttatgatacagtggtcattacacttaagaacatggcttcccatcctgtcagtcttcatgctgttggtgtatcctactggaaagcttctgagggagctgaatatgatgatcagaccagtcaaagggagaaagaagatgataaagtcttccctggtggaagccatacatatgtctggcaggtcctgaaagagaatggtccaatggcctctgacccactgtgccttacctactcatatctttctcatgtggacctggtaaaagacttgaattcaggcctcattggagccctactagtatgtagagaagggagtctggccaaggaaaagacacagaccttgcacaaatttatactactttttgctgtatttgatgaagggaaaagttggcactcagaaacaaagaactccttgatgcaggatagggatgctgcatctgctcgggcctggcctaaaatgcacacagtcaatggttatgtaaacaggtctctgccaggtctgattggatgccacaggaaatcagtctattggcatgtgattggaatgggcaccactcctgaagtgcactcaatattcctcgaaggtcacacatttcttgtgaggaaccatcgccaggctagcttggaaatctcgccaataactttccttactgctcaaacactcttgatggaccttggacagtttctactgttttgtcatatctcttcccaccaacatgatggcatggaagcttatgtcaaagtagacagctgtccagaggaaccccaactacgaatgaaaaataatgaagaagcggaagactatgatgatgatcttactgattctgaaatggatgtggtcaggtttgatgatgacaactctccttcctttatccaaattcgctcagttgccaagaagcatcctaaaacttgggtacattacattgctgctgaagaggaggactgggactatgctcccttagtcctcgcccccgatggcgcgccaaccagtacggagccgtccgaggggagcgcaccaggaagcccggctgggagcccgacttctaccgaagagggtacatctaccgaaccaagtgaaggttcagcaccaggcacctcaacagaaccctctgagggctcggcgcctggtacaagtgagtccgccaccccagaatccgggcctgggacaagcacagaaccttcggaagggagtgcccctggaacatccgaatcggcaaccccagaatcagggccaggatctgagcccgcgacttcgggctccgagacgcctgggacatccaccgagccctccgaaggatcagccccaggcaccagcacggagccctctgagggaagcgcacctggtaccagcgaaagcgcaactcccgaatcaggtcccggtacgagcgagtcggcgaccccggagagcgggccaggtgcctcgagcgacagaagttataaaagtcaatatttgaacaatggccctcagcggattggtaggaagtacaaaaaagtccgatttatggcatacacagatgaaacctttaagactcgtgaagctattcagcatgaatcaggaatcttgggacctttactttatggggaagttggagacacactgttgattatatttaagaatcaagcaagcagaccatataacatctaccctcacggaatcactgatgtccgtcctttgtattcaaggagattaccaaaaggtgtaaaacatttgaaggattttccaattctgccaggagaaatattcaaatataaatggacagtgactgtagaagatgggccaactaaatcagatcctcggtgcctgacccgctattactctagtttcgttaatatggagagagatctagcttcaggactcattggccctctcctcatctgctacaaagaatctgtagatcaaagaggaaaccagataatgtcagacaagaggaatgtcatcctgttttctgtatttgatgagaaccgaagctggtacctcacagagaatatacaacgctttctccccaatccagctggagtgcagcttgaggatccagagttccaagcctccaacatcatgcacagcatcaatggctatgtttttgatagtttgcagttgtcagtttgtttgcatgaggtggcatactggtacattctaagcattggagcacagactgacttcctttctgtcttcttctctggatataccttcaaacacaaaatggtctatgaagacacactcaccctattcccattctcaggagaaactgtcttcatgtcgatggaaaacccaggtctatggattctggggtgccacaactcagactttcggaacagaggcatgaccgccttactgaaggtttctagttgtgacaagaacactggtgattattacgaggacagttatgaagatatttcagcatacttgctgagtaaaaacaatgccattgaaccaagaagcttctctcaaaacggcgcgccaagtcccgctggaagcccaactagcaccgaagaggggacctcagagtccgccacccccgagtccggccctggctctgagcctgccactagcggctccgagactcctggcacatccgaaagcgctacacccgagagtggacccggcacctctaccgagcccagtgagggctccgcccctggaacaagcaccgagcccagcgaaggcagcgccccagggacctccacagagcccagtgaaggcagtgctcctggcaccagcaccgaaccaagcgagggctctgcacccgggacctccaccgagccaagcgaaggctctgcccctggcacttccaccgagcccagcgaaggcagcgcccctgggagccccgctggctctcccaccagcactgaggagggcacatctaccgaaccaagtgaaggctctgcaccaggtgcctcgagcccaccagtcttgaaacgccatcaagctgaaataactcgtactactcttcagtcagatcaagaggaaatcgattatgatgataccatatcagttgaaatgaagaaggaagattttgacatttatgatgaggatgaaaatcagagcccccgcagctttcaaaagaaaacacgacactattttattgctgcagtggagaggctctgggattatgggatgagtagctccccacatgttctaagaaacagggctcagggcgcgccaggtacacccggatcgggtacagcgtcatcgagccccggtgcgtcacctggtacgtcgagcacggggtcgccaggggcgtcccctgggacgtcctcaacaggctcgcccggtgcgtcacccggcacgtcgtccacgggttcacctggtagctccccttccgcgtccactggcaccgggcctggaactccggggagcggcacagcgagctcgtcgccgggagcatcgcctgggacatcgagcaccgggtcgccaggagcatcgcccggaacatccagcacaggaagccccggcgcgtcgcccgggacatcaagcacaggttccccgggatcgagcacgccgtccggagccactggatcaccagggagctcgacaccttccggcgcaacgggatcgcccggagccagcccgggtacgtcaagcactggctcccctgcctcgagcagggctcagagtggcagtgtccctcagttcaagaaagttgttttccaggaatttactgatggctcctttactcagcccttataccgtggagaactaaatgaacatttgggactcctggggccatatataagagcagaagttgaagataatatcatggtaactttcagaaatcaggcctctcgtccctattccttctattctagccttatttcttatgaggaagatcagaggcaaggagcagaacctagaaaaaactttgtcaagcctaatgaaaccaaaacttacttttggaaagtgcaacatcatatggcacccactaaagatgagtttgactgcaaagcctgggcttatttctctgatgttgacctggaaaaagatgtgcactcaggcctgattggaccccttctggtctgccacactaacacactgaaccctgctcatgggagacaagtgacagtacaggaatttgctctgtttttcaccatctttgatgagaccaaaagctggtacttcactgaaaatatggaaagaaactgcaggggcgcgccaacgtccgaaagtgctacccctgagtcaggccctggtagtgagcctgccacaagcggaagcgaaactccggggacctcagagtctgccactcccgaatcggggccaggctctgaaccggccacttcagggagcgaaacaccaggaacatcggagagcgctaccccggagagcgggccaggaactagtactgagcctagcgagggaagtgcacctggtacaagcgagtccgccacacccgagtctggccctggctctccagcgggctcacccacgagcactgaagagggctctcccgctggcagcccaacgtcgacagaagaaggatcaccagcaggctcccccacatcaacagaggagggtacatcagaatctgctactcccgagagtggacccggtacctccactgagcccagcgaggggagtgcaccaggtgcctcgagcgctccctgcaatatccagatggaagatcccacttttaaagagaattatcgcttccatgcaatcaatggctacataatggatacactacctggcttagtaatggctcaggatcaaaggattcgatggtatctgctcagcatgggcagcaatgaaaacatccattctattcatttcagtggacatgtgttcactgtacgaaaaaaagaggagtataaaatggcactgtacaatctctatccaggtgtttttgagacagtggaaatgttaccatccaaagctggaatttggcgggtggaatgccttattggcgagcatctacatgctgggatgagcacactttttctggtgtacagcaataagtgtcagactcccctgggaatggcttctggacacattagagattttcagattacagcttcaggacaatatggacagtgggccccaaagctggccagacttcattattccggatcaatcaatgcctggagcaccaaggagcccttttcttggatcaaggtggatctgttggcaccaatgattattcacggcatcaagacccagggtgcccgtcagaagttctccagcctctacatctctcagtttatcatcatgtatagtcttgatgggaagaagtggcagacttatcgaggaaattccactggaaccttaatggtcttctttggcaatgtggattcatctgggataaaacacaatatttttaaccctccaattattgctcgatacatccgtttgcacccaactcattatagcattcgcagcactcttcgcatggagttgatgggctgtgatttaaatagttgcagcatgccattgggaatggagagtaaagcaatatcagatgcacagattactgcttcatcctactttaccaatatgtttgccacctggtctccttcaaaagctcgacttcacctccaagggaggagtaatgcctggagacctcaggtgaataatccaaaagagtggctgcaagtggacttccagaagacaatgaaagtcacaggagtaactactcagggagtaaaatctctgcttaccagcatgtatgtgaaggagttcctcatctccagcagtcaagatggccatcagtggactctcttttttcagaatggcaaagtaaaggtttttcagggaaatcaagactccttcacacctgtggtgaactctctagacccaccgttactgactcgctaccttcgaattcacccccagagttgggtgcaccagattgccctgaggatggaggttctgggctgcgaggcacaggacctctacggcgcgccaggtacctcagagtctgctacccccgagtcagggccaggatcagagccagccacctccgggtctgagacacccgggacttccgagagtgccacccctgagtccggacccgggtccgagcccgccacttccggctccgaaactcccggcacaagcgagagcgctaccccagagtcaggaccaggaacatctacagagccctctgaaggctccgctccagggtccccagccggcagtcccactagcaccgaggagggaacctctgaaagcgccacacccgaatcagggccagggtctgagcctgctaccagcggcagcgagacaccaggcacctctgagtccgccacaccagagtccggacccggatctcccgctgggagccccacctccactgaggagggatctcctgctggctctccaacatctactgaggaaggtacctcaaccgagccatccgagggatcagctcccggcacctcagagtcggcaaccccggagtctggacccggaacttccgaaagtgccacaccagagtccggtcccgggacttcagaatcagcaacacccgagtccggccctgggtctgaacccgccacaagtggtagtgagacaccaggatcagaacctgctacctcagggtcagagacacccggatctccggcaggctcaccaacctccactgaggagggcaccagcacagaaccaagcgagggctccgcacccggaacaagcactgaacccagtgagggttcagcacccggctctgagccggccacaagtggcagtgagacacccggcacttcagagagtgccacccccgagagtggcccaggcactagtaccgagccctctgaaggcagtgcgccagcctcgagcgaacaaaaactcatctcagaagaggatctgtcacctgcaaccggtcatcatcaccatcaccattga

SEQ ID NO: 1185 - protein, 2206 aa, synthetic construct
  REGION 1..2206: note = Description of Artificial Sequence: Synthetic polypeptide
ATRRYYLGAVELSWDYMQSDLGELPVDARFPPRVPKSFPFNTSVVYKKTLFVEFTDHLFNIAKPRPPWMGLLGPTIQAEVYDTVVITLKNMASHPVSLHAVGVSYWKASEGAEYDDQTSQREKEDDKVFPGGSHTYVWQVLKENGPMASDPLCLTYSYLSHVDLVKDLNSGLIGALLVCREGSLAKEKTQTLHKFILLFAVFDEGKSWHSETKNSLMQDRDAASARAWPKMHTVNGYVNRSLPGLIGCHRKSVYWHVIGMGTTPEVHSIFLEGHTFLVRNHRQASLEISPITFLTAQTLLMDLGQFLLFCHISSHQHDGMEAYVKVDSCPEEPQLRMKNNEEAEDYDDDLTDSEMDVVRFDDDNSPSFIQIRSVAKKHPKTWVHYIAAEEEDWDYAPLVLAPDDRSYKSQYLNNGPQRIGRKYKKVRFMAYTDETFKTREAIQHESGILGPLLYGEVGDTLLIIFKNQASRPYNIYPHGITDVRPLYSRRLPKGVKHLKDFPILPGEIFKYKWTVTVEDGPTKSDPRCLTRYYSSFVNMERDLASGLIGPLLICYKESVDQRGNQIMSDKRNVILFSVFDENRSWYLTENIQRFLPNPAGVQLEDPEFQASNIMHSINGYVFDSLQLSVCLHEVAYWYILSIGAQTDFLSVFFSGYTFKHKMVYEDTLTLFPFSGETVFMSMENPGLWILGCHNSDFRNRGMTALLKVSSCDKNTGDYYEDSYEDISAYLLSKNNAIEPRSFSQNGAPSPAGSPTSTEEGTSESATPESGPGSEPATSGSETPGTSESATPESGPGTSTEPSEGSAPGTSTEPSEGSAPGTSTEPSEGSAPGTSTEPSEGSAPGTSTEPSEGSAPGTSTEPSEGSAPGSPAGSPTSTEEGTSTEPSEGSAPGASSPPVLKRHQAEITRTTLQSDQEEIDYDDTISVEMKKEDFDIYDEDENQSPRSFQKKTRHYFIAAVERLWDYGMSSSPHVLRNRAQGAPGTPGSGTASSSPGASPGTSSTGSPGASPGTSSTGSPGASPGTSSTGSPGSSPSASTGTGPGTPGSGTASSSPGASPGTSSTGSPGASPGTSSTGSPGASPGTSSTGSPGSSTPSGATGSPGSSTPSGATGSPGASPGTSSTGSPASSRAQSGSVPQFKKVVFQEFTDGSFTQPLYRGELNEHLGLLGPYIRAEVEDNIMVTFRNQASRPYSFYSSLISYEEDQRQGAEPRKNFVKPNETKTYFWKVQHHMAPTKDEFDCKAWAYFSDVDLEKDVHSGLIGPLLVCHTNTLNPAHGRQVTVQEFALFFTIFDETKSWYFTENMERNCRGAPTSESATPESGPGSEPATSGSETPGTSESATPESGPGSEPATSGSETPGTSESATPESGPGTSTEPSEGSAPGTSESATPESGPGSPAGSPTSTEEGSPAGSPTSTEEGSPAGSPTSTEEGTSESATPESGPGTSTEPSEGSAPGASSAPCNIQMEDPTFKENYRFHAINGYIMDTLPGLVMAQDQRIRWYLLSMGSNENIHSIHFSGHVFTVRKKEEYKMALYNLYPGVFETVEMLPSKAGIWRVECLIGEHLHAGMSTLFLVYSNKCQTPLGMASGHIRDFQITASGQYGQWAPKLARLHYSGSINAWSTKEPFSWIKVDLLAPMIIHGIKTQGARQKFSSLYISQFIIMYSLDGKKWQTYRGNSTGTLMVFFGNVDSSGIKHNIFNPPIIARYIRLHPTHYSIRSTLRMELMGCDLNSCSMPLGMESKAISDAQITASSYFTNMFATWSPSKARLHLQGRSNAWRPQVNNPKEWLQVDFQKTMKVTGVTTQGVKSLLTSMYVKEFLISSSQDGHQWTLFFQNGKVKVFQGNQDSFTPVVNSLDPPLLTRYLRIHPQSWVHQIALRMEVLGCEAQDLYGAPGTSESATPESGPGSEPATSGSETPGTSESATPESGPGSEPATSGSETPGTSESATPESGPGTSTEPSEGSAPGSPAGSPTSTEEGTSESATPESGPGSEPATSGSETPGTSESATPESGPGSPAGSPTSTEEGSPAGSPTSTEEGTSTEPSEGSAPGTSESATPESGPGTSESATPESGPGTSESATPESGPGSEPATSGSETPGSEPATSGSETPGSPAGSPTSTEEGTSTEPSEGSAPGTSTEPSEGSAPGSEPATSGSETPGTSESATPESGPGTSTEPSEGSAPASSEQKLISEEDLSPATGHHHHHH

SEQ ID NO: 1186 - DNA, 6621 bp, synthetic construct
  misc_feature 1..6621: note = Description of Artificial Sequence: Synthetic polynucleotide
  source 1..6621: mol_type = other DNA
gccaccagaagatactacctgggtgcagtggaactgtcatgggactatatgcaaagtgatctcggtgagctgcctgtggacgcaagatttcctcctagagtgccaaaatcttttccattcaacacctcagtcgtgtacaaaaagactctgtttgtagaattcacggatcaccttttcaacatcgctaagccaaggccaccctggatgggtctgctaggtcctaccatccaggctgaggtttatgatacagtggtcattacacttaagaacatggcttcccatcctgtcagtcttcatgctgttggtgtatcctactggaaagcttctgagggagctgaatatgatgatcagaccagtcaaagggagaaagaagatgataaagtcttccctggtggaagccatacatatgtctggcaggtcctgaaagagaatggtccaatggcctctgacccactgtgccttacctactcatatctttctcatgtggacctggtaaaagacttgaattcaggcctcattggagccctactagtatgtagagaagggagtctggccaaggaaaagacacagaccttgcacaaatttatactactttttgctgtatttgatgaagggaaaagttggcactcagaaacaaagaactccttgatgcaggatagggatgctgcatctgctcgggcctggcctaaaatgcacacagtcaatggttatgtaaacaggtctctgccaggtctgattggatgccacaggaaatcagtctattggcatgtgattggaatgggcaccactcctgaagtgcactcaatattcctcgaaggtcacacatttcttgtgaggaaccatcgccaggctagcttggaaatctcgccaataactttccttactgctcaaacactcttgatggaccttggacagtttctactgttttgtcatatctcttcccaccaacatgatggcatggaagcttatgtcaaagtagacagctgtccagaggaaccccaactacgaatgaaaaataatgaagaagcggaagactatgatgatgatcttactgattctgaaatggatgtggtcaggtttgatgatgacaactctccttcctttatccaaattcgctcagttgccaagaagcatcctaaaacttgggtacattacattgctgctgaagaggaggactgggactatgctcccttagtcctcgcccccgatgacagaagttataaaagtcaatatttgaacaatggccctcagcggattggtaggaagtacaaaaaagtccgatttatggcatacacagatgaaacctttaagactcgtgaagctattcagcatgaatcaggaatcttgggacctttactttatggggaagttggagacacactgttgattatatttaagaatcaagcaagcagaccatataacatctaccctcacggaatcactgatgtccgtcctttgtattcaaggagattaccaaaaggtgtaaaacatttgaaggattttccaattctgccaggagaaatattcaaatataaatggacagtgactgtagaagatgggccaactaaatcagatcctcggtgcctgacccgctattactctagtttcgttaatatggagagagatctagcttcaggactcattggccctctcctcatctgctacaaagaatctgtagatcaaagaggaaaccagataatgtcagacaagaggaatgtcatcctgttttctgtatttgatgagaaccgaagctggtacctcacagagaatatacaacgctttctccccaatccagctggagtgcagcttgaggatccagagttccaagcctccaacatcatgcacagcatcaatggctatgtttttgatagtttgcagttgtcagtttgtttgcatgaggtggcatactggtacattctaagcattggagcacagactgacttcctttctgtcttcttctctggatataccttcaaacacaaaatggtctatgaagacacactcaccctattcccattctcaggagaaactgtcttcatgtcgatggaaaacccaggtctatggattctggggtgccacaactcagactttcggaacagaggcatgaccgccttactgaaggtttctagttgtgacaagaacactggtgattattacgaggacagttatgaagatatttcagcatacttgctgagtaaaaacaatgccattgaaccaagaagcttctctcaaaacggcgcgccaagtcccgctggaagcccaactagcaccgaagaggggacctcagagtccgccacccccgagtccggccctggctctgagcctgccactagcggctccgagactcctggcacatccgaaagcgctacacccgagagtggacccggcacctctaccgagcccagtgagggctccgcccctggaacaagcaccgagcccagcgaaggcagcgccccagggacctccacagagcccagtgaaggcagtgctcctggcaccagcaccgaaccaagcgagggctctgcacccgggacctccaccgagccaagcgaaggctctgcccctggcacttccaccgagcccagcgaaggcagcgcccctgggagccccgctggctctcccaccagcactgaggagggcacatctaccgaaccaagtgaaggctctgcaccaggtgcctcgagcccaccagtcttgaaacgccatcaagctgaaataactcgtactactcttcagtcagatcaagaggaaatcgattatgatgataccatatcagttgaaatgaagaaggaagattttgacatttatgatgaggatgaaaatcagagcccccgcagctttcaaaagaaaacacgacactattttattgctgcagtggagaggctctgggattatgggatgagtagctccccacatgttctaagaaacagggctcagggcgcgccaggtacacccggatcgggtacagcgtcatcgagccccggtgcgtcacctggtacgtcgagcacggggtcgccaggggcgtcccctgggacgtcctcaacaggctcgcccggtgcgtcacccggcacgtcgtccacgggttcacctggtagctccccttccgcgtccactggcaccgggcctggaactccggggagcggcacagcgagctcgtcgccgggagcatcgcctgggacatcgagcaccgggtcgccaggagcatcgcccggaacatccagcacaggaagccccggcgcgtcgcccgggacatcaagcacaggttccccgggatcgagcacgccgtccggagccactggatcaccagggagctcgacaccttccggcgcaacgggatcgcccggagccagcccgggtacgtcaagcactggctcccctgcctcgagcagggctcagagtggcagtgtccctcagttcaagaaagttgttttccaggaatttactgatggctcctttactcagcccttataccgtggagaactaaatgaacatttgggactcctggggccatatataagagcagaagttgaagataatatcatggtaactttcagaaatcaggcctctcgtccctattccttctattctagccttatttcttatgaggaagatcagaggcaaggagcagaacctagaaaaaactttgtcaagcctaatgaaaccaaaacttacttttggaaagtgcaacatcatatggcacccactaaagatgagtttgactgcaaagcctgggcttatttctctgatgttgacctggaaaaagatgtgcactcaggcctgattggaccccttctggtctgccacactaacacactgaaccctgctcatgggagacaagtgacagtacaggaatttgctctgtttttcaccatctttgatgagaccaaaagctggtacttcactgaaaatatggaaagaaactgcaggggcgcgccaacgtccgaaagtgctacccctgagtcaggccctggtagtgagcctgccacaagcggaagcgaaactccggggacctcagagtctgccactcccgaatcggggccaggctctgaaccggccacttcagggagcgaaacaccaggaacatcggagagcgctaccccggagagcgggccaggaactagtactgagcctagcgagggaagtgcacctggtacaagcgagtccgccacacccgagtctggccctggctctccagcgggctcacccacgagcactgaagagggctctcccgctggcagcccaacgtcgacagaagaaggatcaccagcaggctcccccacatcaacagaggagggtacatcagaatctgctactcccgagagtggacccggtacctccactgagcccagcgaggggagtgcaccaggtgcctcgagcgctccctgcaatatccagatggaagatcccacttttaaagagaattatcgcttccatgcaatcaatggctacataatggatacactacctggcttagtaatggctcaggatcaaaggattcgatggtatctgctcagcatgggcagcaatgaaaacatccattctattcatttcagtggacatgtgttcactgtacgaaaaaaagaggagtataaaatggcactgtacaatctctatccaggtgtttttgagacagtggaaatgttaccatccaaagctggaatttggcgggtggaatgccttattggcgagcatctacatgctgggatgagcacactttttctggtgtacagcaataagtgtcagactcccctgggaatggcttctggacacattagagattttcagattacagcttcaggacaatatggacagtgggccccaaagctggccagacttcattattccggatcaatcaatgcctggagcaccaaggagcccttttcttggatcaaggtggatctgttggcaccaatgattattcacggcatcaagacccagggtgcccgtcagaagttctccagcctctacatctctcagtttatcatcatgtatagtcttgatgggaagaagtggcagacttatcgaggaaattccactggaaccttaatggtcttctttggcaatgtggattcatctgggataaaacacaatatttttaaccctccaattattgctcgatacatccgtttgcacccaactcattatagcattcgcagcactcttcgcatggagttgatgggctgtgatttaaatagttgcagcatgccattgggaatggagagtaaagcaatatcagatgcacagattactgcttcatcctactttaccaatatgtttgccacctggtctccttcaaaagctcgacttcacctccaagggaggagtaatgcctggagacctcaggtgaataatccaaaagagtggctgcaagtggacttccagaagacaatgaaagtcacaggagtaactactcagggagtaaaatctctgcttaccagcatgtatgtgaaggagttcctcatctccagcagtcaagatggccatcagtggactctcttttttcagaatggcaaagtaaaggtttttcagggaaatcaagactccttcacacctgtggtgaactctctagacccaccgttactgactcgctaccttcgaattcacccccagagttgggtgcaccagattgccctgaggatggaggttctgggctgcgaggcacaggacctctacggcgcgccaggtacctcagagtctgctacccccgagtcagggccaggatcagagccagccacctccgggtctgagacacccgggacttccgagagtgccacccctgagtccggacccgggtccgagcccgccacttccggctccgaaactcccggcacaagcgagagcgctaccccagagtcaggaccaggaacatctacagagccctctgaaggctccgctccagggtccccagccggcagtcccactagcaccgaggagggaacctctgaaagcgccacacccgaatcagggccagggtctgagcctgctaccagcggcagcgagacaccaggcacctctgagtccgccacaccagagtccggacccggatctcccgctgggagccccacctccactgaggagggatctcctgctggctctccaacatctactgaggaaggtacctcaaccgagccatccgagggatcagctcccggcacctcagagtcggcaaccccggagtctggacccggaacttccgaaagtgccacaccagagtccggtcccgggacttcagaatcagcaacacccgagtccggccctgggtctgaacccgccacaagtggtagtgagacaccaggatcagaacctgctacctcagggtcagagacacccggatctccggcaggctcaccaacctccactgaggagggcaccagcacagaaccaagcgagggctccgcacccggaacaagcactgaacccagtgagggttcagcacccggctctgagccggccacaagtggcagtgagacacccggcacttcagagagtgccacccccgagagtggcccaggcactagtaccgagccctctgaaggcagtgcgccagcctcgagcgaacaaaaactcatctcagaagaggatctgtcacctgcaaccggtcatcatcaccatcaccattga

SEQ ID NO: 1187 - protein, 2203 aa, synthetic construct
  REGION 1..2203: note = Description of Artificial Sequence: Synthetic polypeptide
ATRRYYLGAVELSWDYMQSDLGELPVGAPGSSPSASTGTGPGSSPSASTGTGPGASPGTSSTGSPGASPGTSSTGSPGSSTPSGATGSPGSSPSASTGTGPGASPGTSSTGSPGSSPSASTGTGPGTPGSGTASSSPGSSTPSGATGSPGSSTPSGATGSPGASPGTSSTGSPASSDARFPPRVPKSFPFNTSVVYKKTLFVEFTDHLFNIAKPRPPWMGLLGPTIQAEVYDTVVITLKNMASHPVSLHAVGVSYWKASEGAEYDDQTSQREKEDDKVFPGGSHTYVWQVLKENGPMASDPLCLTYSYLSHVDLVKDLNSGLIGALLVCREGSLAKEKTQTLHKFILLFAVFDEGKSWHSETKNSLMQDRDAASARAWPKMHTVNGYVNRSLPGLIGCHRKSVYWHVIGMGTTPEVHSIFLEGHTFLVRNHRQASLEISPITFLTAQTLLMDLGQFLLFCHISSHQHDGMEAYVKVDSCPEEPQLRMKNNEEAEDYDDDLTDSEMDVVRFDDDNSPSFIQIRSVAKKHPKTWVHYIAAEEEDWDYAPLVLAPDGAPTSTEPSEGSAPGSPAGSPTSTEEGTSTEPSEGSAPGTSTEPSEGSAPGTSESATPESGPGTSTEPSEGSAPGTSESATPESGPGSEPATSGSETPGTSTEPSEGSAPGTSTEPSEGSAPGTSESATPESGPGTSESATPESGPGASSDRSYKSQYLNNGPQRIGRKYKKVRFMAYTDETFKTREAIQHESGILGPLLYGEVGDTLLIIFKNQASRPYNIYPHGITDVRPLYSRRLPKGVKHLKDFPILPGEIFKYKWTVTVEDGPTKSDPRCLTRYYSSFVNMERDLASGLIGPLLICYKESVDQRGNQIMSDKRNVILFSVFDENRSWYLTENIQRFLPNPAGVQLEDPEFQASNIMHSINGYVFDSLQLSVCLHEVAYWYILSIGAQTDFLSVFFSGYTFKHKMVYEDTLTLFPFSGETVFMSMENPGLWILGCHNSDFRNRGMTALLKVSSCDKNTGDYYEDSYEDISAYLLSKNNAIEPRSFSQNPPVLKRHQREITRTTLQGAPGTPGSGTASSSPGASPGTSSTGSPGASPGTSSTGSPGASPGTSSTGSPGSSPSASTGTGPGTPGSGTASSSPGASPGTSSTGSPGASPGTSSTGSPGASPGTSSTGSPGSSTPSGATGSPGSSTPSGATGSPGASPGTSSTGSPASSSDQEEIDYDDTISVEMKKEDFDIYDEDENQSPRSFQKKTRHYFIAAVERLWDYGMSSSPHVLRNRAQSGSVPQFKKVVFQEFTDGSFTQPLYRGELNEHLGLLGPYIRAEVEDNIMVTFRNQASRPYSFYSSLISYEEDQRQGAEPRKNFVKPNETKTYFWKVQHHMAPTKDEFDCKAWAYFSDVDLEKDVHSGLIGPLLVCHTNTLNPAHGRQVTVQEFALFFTIFDETKSWYFTENMERNCRAPCNIQMEDPTFKENYRFHAINGYIMDTLPGLVMAQDQRIRWYLLSMGSNENIHSIHFSGHVFTVRKKEEYKMALYNLYPGVFETVEMLPSKAGIWRVECLIGEHLHAGMSTLFLVYSNKCQTPLGMASGHIRDFQITASGQYGQWAPKLARLHYSGSINAWSTKEPFSWIKVDLLAPMIIHGIKTQGARQKFSSLYISQFIIMYSLDGKKWQTYRGNSTGTLMVFFGNVDSSGIKHNIFNPPIIARYIRLHPTHYSIRSTLRMELMGCDLNSCSMPLGMESKAISDAQITASSYFTNMFATWSPSKARLHLQGRSNAWRPQVNNPKEWLQVDFQKTMKVTGVTTQGVKSLLTSMYVKEFLISSSQDGHQWTLFFQNGKVKVFQGNQDSFTPVVNSLDPPLLTRYLRIHPQSWVHQIALRMEVLGCEAQDLYGAPGTSESATPESGPGSEPATSGSETPGTSESATPESGPGSEPATSGSETPGTSESATPESGPGTSTEPSEGSAPGSPAGSPTSTEEGTSESATPESGPGSEPATSGSETPGTSESATPESGPGSPAGSPTSTEEGSPAGSPTSTEEGTSTEPSEGSAPGTSESATPESGPGTSESATPESGPGTSESATPESGPGSEPATSGSETPGSEPATSGSETPGSPAGSPTSTEEGTSTEPSEGSAPGTSTEPSEGSAPGSEPATSGSETPGTSESATPESGPGTSTEPSEGSAPASSEQKLISEEDLSPATGHHHHHH

SEQ ID NO: 1188 - DNA, 6612 bp, synthetic construct
  misc_feature 1..6612: note = Description of Artificial Sequence: Synthetic polynucleotide
  source 1..6612: mol_type = other DNA
gccaccagaagatactacctgggtgcagtggaactgtcatgggactatatgcaaagtgatctcggtgagctgcctgtgggcgcgccaggctccagcccctccgcgagcacgggaaccggaccaggttcgtcaccctcagcatcaacggggacgggaccgggggcgtcaccaggaacgtcctccaccggctcgccgggtgcatcacccggaacgtcatcgaccggatcgccagggagctcgacgccatcaggcgcaacaggatcacctggctcaagccctagcgcgtcaaccggcacgggtccgggtgcctcccctggcacgtccagcaccggatcacccggatcgagcccatccgcctcaaccggaaccggacccggtacaccagggtcgggaacagcctcctcgtcaccaggctcctcaaccccctcgggagccacgggttcgcccggttcgtcaacgccttccggagcaactggtagccccggagcatcgccaggaacttcgagcacggggtcgcccgcctcgagcgacgcaagatttcctcctagagtgccaaaatcttttccattcaacacctcagtcgtgtacaaaaagactctgtttgtagaattcacggatcaccttttcaacatcgctaagccaaggccaccctggatgggtctgctaggtcctaccatccaggctgaggtttatgatacagtggtcattacacttaagaacatggcttcccatcctgtcagtcttcatgctgttggtgtatcctactggaaagcttctgagggagctgaatatgatgatcagaccagtcaaagggagaaagaagatgataaagtcttccctggtggaagccatacatatgtctggcaggtcctgaaagagaatggtccaatggcctctgacccactgtgccttacctactcatatctttctcatgtggacctggtaaaagacttgaattcaggcctcattggagccctactagtatgtagagaagggagtctggccaaggaaaagacacagaccttgcacaaatttatactactttttgctgtatttgatgaagggaaaagttggcactcagaaacaaagaactccttgatgcaggatagggatgctgcatctgctcgggcctggcctaaaatgcacacagtcaatggttatgtaaacaggtctctgccaggtctgattggatgccacaggaaatcagtctattggcatgtgattggaatgggcaccactcctgaagtgcactcaatattcctcgaaggtcacacatttcttgtgaggaaccatcgccaggctagcttggaaatctcgccaataactttccttactgctcaaacactcttgatggaccttggacagtttctactgttttgtcatatctcttcccaccaacatgatggcatggaagcttatgtcaaagtagacagctgtccagaggaaccccaactacgaatgaaaaataatgaagaagcggaagactatgatgatgatcttactgattctgaaatggatgtggtcaggtttgatgatgacaactctccttcctttatccaaattcgctcagttgccaagaagcatcctaaaacttgggtacattacattgctgctgaagaggaggactgggactatgctcccttagtcctcgcccccgatggcgcgccaaccagtacggagccgtccgaggggagcgcaccaggaagcccggctgggagcccgacttctaccgaagagggtacatctaccgaaccaagtgaaggttcagcaccaggcacctcaacagaaccctctgagggctcggcgcctggtacaagtgagtccgccaccccagaatccgggcctgggacaagcacagaaccttcggaagggagtgcccctggaacatccgaatcggcaaccccagaatcagggccaggatctgagcccgcgacttcgggctccgagacgcctgggacatccaccgagccctccgaaggatcagccccaggcaccagcacggagccctctgagggaagcgcacctggtaccagcgaaagcgcaactcccgaatcaggtcccggtacgagcgagtcggcgaccccggagagcgggccaggtgcctcgagcgacagaagttataaaagtcaatatttgaacaatggccctcagcggattggtaggaagtacaaaaaagtccgatttatggcatacacagatgaaacctttaagactcgtgaagctattcagcatgaatcaggaatcttgggacctttactttatggggaagttggagacacactgttgattatatttaagaatcaagcaagcagaccatataacatctaccctcacggaatcactgatgtccgtcctttgtattcaaggagattaccaaaaggtgtaaaacatttgaaggattttccaattctgccaggagaaatattcaaatataaatggacagtgactgtagaagatgggccaactaaatcagatcctcggtgcctgacccgctattactctagtttcgttaatatggagagagatctagcttcaggactcattggccctctcctcatctgctacaaagaatctgtagatcaaagaggaaaccagataatgtcagacaagaggaatgtcatcctgttttctgtatttgatgagaaccgaagctggtacctcacagagaatatacaacgctttctccccaatccagctggagtgcagcttgaggatccagagttccaagcctccaacatcatgcacagcatcaatggctatgtttttgatagtttgcagttgtcagtttgtttgcatgaggtggcatactggtacattctaagcattggagcacagactgacttcctttctgtcttcttctctggatataccttcaaacacaaaatggtctatgaagacacactcaccctattcccattctcaggagaaactgtcttcatgtcgatggaaaacccaggtctatggattctggggtgccacaactcagactttcggaacagaggcatgaccgccttactgaaggtttctagttgtgacaagaacactggtgattattacgaggacagttatgaagatatttcagcatacttgctgagtaaaaacaatgccattgaaccaagaagcttctctcaaaacccaccagtcttgaaacgccatcaacgggaaataactcgtactactcttcagggcgcgccaggtacacccggatcgggtacagcgtcatcgagccccggtgcgtcacctggtacgtcgagcacggggtcgccaggggcgtcccctgggacgtcctcaacaggctcgcccggtgcgtcacccggcacgtcgtccacgggttcacctggtagctccccttccgcgtccactggcaccgggcctggaactccggggagcggcacagcgagctcgtcgccgggagcatcgcctgggacatcgagcaccgggtcgccaggagcatcgcccggaacatccagcacaggaagccccggcgcgtcgcccgggacatcaagcacaggttccccgggatcgagcacgccgtccggagccactggatcaccagggagctcgacaccttccggcgcaacgggatcgcccggagccagcccgggtacgtcaagcactggctcccctgcctcgagctcagatcaagaggaaatcgattatgatgataccatatcagttgaaatgaagaaggaagattttgacatttatgatgaggatgaaaatcagagcccccgcagctttcaaaagaaaacacgacactattttattgctgcagtggagaggctctgggattatgggatgagtagctccccacatgttctaagaaacagggctcagagtggcagtgtccctcagttcaagaaagttgttttccaggaatttactgatggctcctttactcagcccttataccgtggagaactaaatgaacatttgggactcctggggccatatataagagcagaagttgaagataatatcatggtaactttcagaaatcaggcctctcgtccctattccttctattctagccttatttcttatgaggaagatcagaggcaaggagcagaacctagaaaaaactttgtcaagcctaatgaaaccaaaacttacttttggaaagtgcaacatcatatggcacccactaaagatgagtttgactgcaaagcctgggcttatttctctgatgttgacctggaaaaagatgtgcactcaggcctgattggaccccttctggtctgccacactaacacactgaaccctgctcatgggagacaagtgacagtacaggaatttgctctgtttttcaccatctttgatgagaccaaaagctggtacttcactgaaaatatggaaagaaactgcagggctccctgcaatatccagatggaagatcccacttttaaagagaattatcgcttccatgcaatcaatggctacataatggatacactacctggcttagtaatggctcaggatcaaaggattcgatggtatctgctcagcatgggcagcaatgaaaacatccattctattcatttcagtggacatgtgttcactgtacgaaaaaaagaggagtataaaatggcactgtacaatctctatccaggtgtttttgagacagtggaaatgttaccatccaaagctggaatttggcgggtggaatgccttattggcgagcatctacatgctgggatgagcacactttttctggtgtacagcaataagtgtcagactcccctgggaatggcttctggacacattagagattttcagattacagcttcaggacaatatggacagtgggccccaaagctggccagacttcattattccggatcaatcaatgcctggagcaccaaggagcccttttcttggatcaaggtggatctgttggcaccaatgattattcacggcatcaagacccagggtgcccgtcagaagttctccagcctctacatctctcagtttatcatcatgtatagtcttgatgggaagaagtggcagacttatcgaggaaattccactggaaccttaatggtcttctttggcaatgtggattcatctgggataaaacacaatatttttaaccctccaattattgctcgatacatccgtttgcacccaactcattatagcattcgcagcactcttcgcatggagttgatgggctgtgatttaaatagttgcagcatgccattgggaatggagagtaaagcaatatcagatgcacagattactgcttcatcctactttaccaatatgtttgccacctggtctccttcaaaagctcgacttcacctccaagggaggagtaatgcctggagacctcaggtgaataatccaaaagagtggctgcaagtggacttccagaagacaatgaaagtcacaggagtaactactcagggagtaaaatctctgcttaccagcatgtatgtgaaggagttcctcatctccagcagtcaagatggccatcagtggactctcttttttcagaatggcaaagtaaaggtttttcagggaaatcaagactccttcacacctgtggtgaactctctagacccaccgttactgactcgctaccttcgaattcacccccagagttgggtgcaccagattgccctgaggatggaggttctgggctgcgaggcacaggacctctacggcgcgccaggtacctcagagtctgctacccccgagtcagggccaggatcagagccagccacctccgggtctgagacacccgggacttccgagagtgccacccctgagtccggacccgggtccgagcccgccacttccggctccgaaactcccggcacaagcgagagcgctaccccagagtcaggaccaggaacatctacagagccctctgaaggctccgctccagggtccccagccggcagtcccactagcaccgaggagggaacctctgaaagcgccacacccgaatcagggccagggtctgagcctgctaccagcggcagcgagacaccaggcacctctgagtccgccacaccagagtccggacccggatctcccgctgggagccccacctccactgaggagggatctcctgctggctctccaacatctactgaggaaggtacctcaaccgagccatccgagggatcagctcccggcacctcagagtcggcaaccccggagtctggacccggaacttccgaaagtgccacaccagagtccggtcccgggacttcagaatcagcaacacccgagtccggccctgggtctgaacccgccacaagtggtagtgagacaccaggatcagaacctgctacctcagggtcagagacacccggatctccggcaggctcaccaacctccactgaggagggcaccagcacagaaccaagcgagggctccgcacccggaacaagcactgaacccagtgagggttcagcacccggctctgagccggccacaagtggcagtgagacacccggcacttcagagagtgccacccccgagagtggcccaggcactagtaccgagccctctgaaggcagtgcgccagcctcgagcgaacaaaaactcatctcagaagaggatctgtcacctgcaaccggtcatcatcaccatcaccattga

SEQ ID NO: 1189 - protein, 2206 aa, synthetic construct
  REGION 1..2206: note = Description of Artificial Sequence: Synthetic polypeptide
ATRRYYLGAVELSWDYMQSDLGELPVGAPGSSPSASTGTGPGSSPSASTGTGPGASPGTSSTGSPGASPGTSSTGSPGSSTPSGATGSPGSSPSASTGTGPGASPGTSSTGSPGSSPSASTGTGPGTPGSGTASSSPGSSTPSGATGSPGSSTPSGATGSPGASPGTSSTGSPASSDARFPPRVPKSFPFNTSVVYKKTLFVEFTDHLFNIAKPRPPWMGLLGPTIQAEVYDTVVITLKNMASHPVSLHAVGVSYWKASEGAEYDDQTSQREKEDDKVFPGGSHTYVWQVLKENGPMASDPLCLTYSYLSHVDLVKDLNSGLIGALLVCREGSLAKEKTQTLHKFILLFAVFDEGKSWHSETKNSLMQDRDAASARAWPKMHTVNGYVNRSLPGLIGCHRKSVYWHVIGMGTTPEVHSIFLEGHTFLVRNHRQASLEISPITFLTAQTLLMDLGQFLLFCHISSHQHDGMEAYVKVDSCPEEPQLRMKNNEEAEDYDDDLTDSEMDVVRFDDDNSPSFIQIRSVAKKHPKTWVHYIAAEEEDWDYAPLVLAPDGAPTSTEPSEGSAPGSPAGSPTSTEEGTSTEPSEGSAPGTSTEPSEGSAPGTSESATPESGPGTSTEPSEGSAPGTSESATPESGPGSEPATSGSETPGTSTEPSEGSAPGTSTEPSEGSAPGTSESATPESGPGTSESATPESGPGASSDRSYKSQYLNNGPQRIGRKYKKVRFMAYTDETFKTREAIQHESGILGPLLYGEVGDTLLIIFKNQASRPYNIYPHGITDVRPLYSRRLPKGVKHLKDFPILPGEIFKYKWTVTVEDGPTKSDPRCLTRYYSSFVNMERDLASGLIGPLLICYKESVDQRGNQIMSDKRNVILFSVFDENRSWYLTENIQRFLPNPAGVQLEDPEFQASNIMHSINGYVFDSLQLSVCLHEVAYWYILSIGAQTDFLSVFFSGYTFKHKMVYEDTLTLFPFSGETVFMSMENPGLWILGCHNSDFRNRGMTALLKVSSCDKNTGDYYEDSYEDISAYLLSKNNAIEPRSFSQNPPVLKRHQREITRTTLQSDQEEIDYDDTISVEMKKEDFDIYDEDENQSPRSFQKKTRHYFIAAVERLWDYGMSSSPHVLRNRAQGAPGTPGSGTASSSPGASPGTSSTGSPGASPGTSSTGSPGASPGTSSTGSPGSSPSASTGTGPGTPGSGTASSSPGASPGTSSTGSPGASPGTSSTGSPGASPGTSSTGSPGSSTPSGATGSPGSSTPSGATGSPGASPGTSSTGSPASSRAQSGSVPQFKKVVFQEFTDGSFTQPLYRGELNEHLGLLGPYIRAEVEDNIMVTFRNQASRPYSFYSSLISYEEDQRQGAEPRKNFVKPNETKTYFWKVQHHMAPTKDEFDCKAWAYFSDVDLEKDVHSGLIGPLLVCHTNTLNPAHGRQVTVQEFALFFTIFDETKSWYFTENMERNCRAPCNIQMEDPTFKENYRFHAINGYIMDTLPGLVMAQDQRIRWYLLSMGSNENIHSIHFSGHVFTVRKKEEYKMALYNLYPGVFETVEMLPSKAGIWRVECLIGEHLHAGMSTLFLVYSNKCQTPLGMASGHIRDFQITASGQYGQWAPKLARLHYSGSINAWSTKEPFSWIKVDLLAPMIIHGIKTQGARQKFSSLYISQFIIMYSLDGKKWQTYRGNSTGTLMVFFGNVDSSGIKHNIFNPPIIARYIRLHPTHYSIRSTLRMELMGCDLNSCSMPLGMESKAISDAQITASSYFTNMFATWSPSKARLHLQGRSNAWRPQVNNPKEWLQVDFQKTMKVTGVTTQGVKSLLTSMYVKEFLISSSQDGHQWTLFFQNGKVKVFQGNQDSFTPVVNSLDPPLLTRYLRIHPQSWVHQIALRMEVLGCEAQDLYGAPGTSESATPESGPGSEPATSGSETPGTSESATPESGPGSEPATSGSETPGTSESATPESGPGTSTEPSEGSAPGSPAGSPTSTEEGTSESATPESGPGSEPATSGSETPGTSESATPESGPGSPAGSPTSTEEGSPAGSPTSTEEGTSTEPSEGSAPGTSESATPESGPGTSESATPESGPGTSESATPESGPGSEPATSGSETPGSEPATSGSETPGSPAGSPTSTEEGTSTEPSEGSAPGTSTEPSEGSAPGSEPATSGSETPGTSESATPESGPGTSTEPSEGSAPASSEQKLISEEDLSPATGHHHHHH

SEQ ID NO: 1190 - DNA, 6621 bp, synthetic construct
  misc_feature 1..6621: note = Description of Artificial Sequence: Synthetic polynucleotide
  source 1..6621: mol_type = other DNA
gccaccagaagatactacctgggtgcagtggaactgtcatgggactatatgcaaagtgatctcggtgagctgcctgtgggcgcgccaggctccagcccctccgcgagcacgggaaccggaccaggttcgtcaccctcagcatcaacggggacgggaccgggggcgtcaccaggaacgtcctccaccggctcgccgggtgcatcacccggaacgtcatcgaccggatcgccagggagctcgacgccatcaggcgcaacaggatcacctggctcaagccctagcgcgtcaaccggcacgggtccgggtgcctcccctggcacgtccagcaccggatcacccggatcgagcccatccgcctcaaccggaaccggacccggtacaccagggtcgggaacagcctcctcgtcaccaggctcctcaaccccctcgggagccacgggttcgcccggttcgtcaacgccttccggagcaactggtagccccggagcatcgccaggaacttcgagcacggggtcgcccgcctcgagcgacgcaagatttcctcctagagtgccaaaatcttttccattcaacacctcagtcgtgtacaaaaagactctgtttgtagaattcacggatcaccttttcaacatcgctaagccaaggccaccctggatgggtctgctaggtcctaccatccaggctgaggtttatgatacagtggtcattacacttaagaacatggcttcccatcctgtcagtcttcatgctgttggtgtatcctactggaaagcttctgagggagctgaatatgatgatcagaccagtcaaagggagaaagaagatgataaagtcttccctggtggaagccatacatatgtctggcaggtcctgaaagagaatggtccaatggcctctgacccactgtgccttacctactcatatctttctcatgtggacctggtaaaagacttgaattcaggcctcattggagccctactagtatgtagagaagggagtctggccaaggaaaagacacagaccttgcacaaatttatactactttttgctgtatttgatgaagggaaaagttggcactcagaaacaaagaactccttgatgcaggatagggatgctgcatctgctcgggcctggcctaaaatgcacacagtcaatggttatgtaaacaggtctctgccaggtctgattggatgccacaggaaatcagtctattggcatgtgattggaatgggcaccactcctgaagtgcactcaatattcctcgaaggtcacacatttcttgtgaggaaccatcgccaggctagcttggaaatctcgccaataactttccttactgctcaaacactcttgatggaccttggacagtttctactgttttgtcatatctcttcccaccaacatgatggcatggaagcttatgtcaaagtagacagctgtccagaggaaccccaactacgaatgaaaaataatgaagaagcggaagactatgatgatgatcttactgattctgaaatggatgtggtcaggtttgatgatgacaactctccttcctttatccaaattcgctcagttgccaagaagcatcctaaaacttgggtacattacattgctgctgaagaggaggactgggactatgctcccttagtcctcgcccccgatggcgcgccaaccagtacggagccgtccgaggggagcgcaccaggaagcccggctgggagcccgacttctaccgaagagggtacatctaccgaaccaagtgaaggttcagcaccaggcacctcaacagaaccctctgagggctcggcgcctggtacaagtgagtccgccaccccagaatccgggcctgggacaagcacagaaccttcggaagggagtgcccctggaacatccgaatcggcaaccccagaatcagggccaggatctgagcccgcgacttcgggctccgagacgcctgggacatccaccgagccctccgaaggatcagccccaggcaccagcacggagccctctgagggaagcgcacctggtaccagcgaaagcgcaactcccgaatcaggtcccggtacgagcgagtcggcgaccccggagagcgggccaggtgcctcgagcgacagaagttataaaagtcaatatttgaacaatggccctcagcggattggtaggaagtacaaaaaagtccgatttatggcatacacagatgaaacctttaagactcgtgaagctattcagcatgaatcaggaatcttgggacctttactttatggggaagttggagacacactgttgattatatttaagaatcaagcaagcagaccatataacatctaccctcacggaatcactgatgtccgtcctttgtattcaaggagattaccaaaaggtgtaaaacatttgaaggattttccaattctgccaggagaaatattcaaatataaatggacagtgactgtagaagatgggccaactaaatcagatcctcggtgcctgacccgctattactctagtttcgttaatatggagagagatctagcttcaggactcattggccctctcctcatctgctacaaagaatctgtagatcaaagaggaaaccagataatgtcagacaagaggaatgtcatcctgttttctgtatttgatgagaaccgaagctggtacctcacagagaatatacaacgctttctccccaatccagctggagtgcagcttgaggatccagagttccaagcctccaacatcatgcacagcatcaatggctatgtttttgatagtttgcagttgtcagtttgtttgcatgaggtggcatactggtacattctaagcattggagcacagactgacttcctttctgtcttcttctctggatataccttcaaacacaaaatggtctatgaagacacactcaccctattcccattctcaggagaaactgtcttcatgtcgatggaaaacccaggtctatggattctggggtgccacaactcagactttcggaacagaggcatgaccgccttactgaaggtttctagttgtgacaagaacactggtgattattacgaggacagttatgaagatatttcagcatacttgctgagtaaaaacaatgccattgaaccaagaagcttctctcaaaacccaccagtcttgaaacgccatcaacgggaaataactcgtactactcttcagtcagatcaagaggaaatcgattatgatgataccatatcagttgaaatgaagaaggaagattttgacatttatgatgaggatgaaaatcagagcccccgcagctttcaaaagaaaacacgacactattttattgctgcagtggagaggctctgggattatgggatgagtagctccccacatgttctaagaaacagggctcagggcgcgccaggtacacccggatcgggtacagcgtcatcgagccccggtgcgtcacctggtacgtcgagcacggggtcgccaggggcgtcccctgggacgtcctcaacaggctcgcccggtgcgtcacccggcacgtcgtccacgggttcacctggtagctccccttccgcgtccactggcaccgggcctggaactccggggagcggcacagcgagctcgtcgccgggagcatcgcctgggacatcgagcaccgggtcgccaggagcatcgcccggaacatccagcacaggaagccccggcgcgtcgcccgggacatcaagcacaggttccccgggatcgagcacgccgtccggagccactggatcaccagggagctcgacaccttccggcgcaacgggatcgcccggagccagcccgggtacgtcaagcactggctcccctgcctcgagcagggctcagagtggcagtgtccctcagttcaagaaagttgttttccaggaatttactgatggctcctttactcagcccttataccgtggagaactaaatgaacatttgggactcctggggccatatataagagcagaagttgaagataatatcatggtaactttcagaaatcaggcctctcgtccctattccttctattctagccttatttcttatgaggaagatcagaggcaaggagcagaacctagaaaaaactttgtcaagcctaatgaaaccaaaacttacttttggaaagtgcaacatcatatggcacccactaaagatgagtttgactgcaaagcctgggcttatttctctgatgttgacctggaaaaagatgtgcactcaggcctgattggaccccttctggtctgccacactaacacactgaaccctgctcatgggagacaagtgacagtacaggaatttgctctgtttttcaccatctttgatgagaccaaaagctggtacttcactgaaaatatggaaagaaactgcagggctccctgcaatatccagatggaagatcccacttttaaagagaattatcgcttccatgcaatcaatggctacataatggatacactacctggcttagtaatggctcaggatcaaaggattcgatggtatctgctcagcatgggcagcaatgaaaacatccattctattcatttcagtggacatgtgttcactgtacgaaaaaaagaggagtataaaatggcactgtacaatctctatccaggtgtttttgagacagtggaaatgttaccatccaaagctggaatttggcgggtggaatgccttattggcgagcatctacatgctgggatgagcacactttttctggtgtacagcaataagtgtcagactcccctgggaatggcttctggacacattagagattttcagattacagcttcaggacaatatggacagtgggccccaaagctggccagacttcattattccggatcaatcaatgcctggagcaccaaggagcccttttcttggatcaaggtggatctgttggcaccaatgattattcacggcatcaagacccagggtgcccgtcagaagttctccagcctctacatctctcagtttatcatcatgtatagtcttgatgggaagaagtggcagacttatcgaggaaattccactggaaccttaatggtcttctttggcaatgtggattcatctgggataaaacacaatatttttaaccctccaattattgctcgatacatccgtttgcacccaactcattatagcattcgcagcactcttcgcatggagttgatgggctgtgatttaaatagttgcagcatgccattgggaatggagagtaaagcaatatcagatgcacagattactgcttcatcctactttaccaatatgtttgccacctggtctccttcaaaagctcgacttcacctccaagggaggagtaatgcctggagacctcaggtgaataatccaaaagagtggctgcaagtggacttccagaagacaatgaaagtcacaggagtaactactcagggagtaaaatctctgcttaccagcatgtatgtgaaggagttcctcatctccagcagtcaagatggccatcagtggactctcttttttcagaatggcaaagtaaaggtttttcagggaaatcaagactccttcacacctgtggtgaactctctagacccaccgttactgactcgctaccttcgaattcacccccagagttgggtgcaccagattgccctgaggatggaggttctgggctgcgaggcacaggacctctacggcgcgccaggtacctcagagtctgctacccccgagtcagggccaggatcagagccagccacctccgggtctgagacacccgggacttccgagagtgccacccctgagtccggacccgggtccgagcccgccacttccggctccgaaactcccggcacaagcgagagcgctaccccagagtcaggaccaggaacatctacagagccctctgaaggctccgctccagggtccccagccggcagtcccactagcaccgaggagggaacctctgaaagcgccacacccgaatcagggccagggtctgagcctgctaccagcggcagcgagacaccaggcacctctgagtccgccacaccagagtccggacccggatctcccgctgggagccccacctccactgaggagggatctcctgctggctctccaacatctactgaggaaggtacctcaaccgagccatccgagggatcagctcccggcacctcagagtcggcaaccccggagtctggacccggaacttccgaaagtgccacaccagagtccggtcccgggacttcagaatcagcaacacccgagtccggccctgggtctgaacccgccacaagtggtagtgagacaccaggatcagaacctgctacctcagggtcagagacacccggatctccggcaggctcaccaacctccactgaggagggcaccagcacagaaccaagcgagggctccgcacccggaacaagcactgaacccagtgagggttcagcacccggctctgagccggccacaagtggcagtgagacacccggcacttcagagagtgccacccccgagagtggcccaggcactagtaccgagccctctgaaggcagtgcgccagcctcgagcgaacaaaaactcatctcagaagaggatctgtcacctgcaaccggtcatcatcaccatcaccattga

SEQ ID NO: 1191 - protein, 2203 aa, synthetic construct
  REGION 1..2203: note = Description of Artificial Sequence: Synthetic polypeptide
ATRRYYLGAVELSWDYMQSDLGELPVGAPGSSPSASTGTGPGSSPSASTGTGPGASPGTSSTGSPGASPGTSSTGSPGSSTPSGATGSPGSSPSASTGTGPGASPGTSSTGSPGSSPSASTGTGPGTPGSGTASSSPGSSTPSGATGSPGSSTPSGATGSPGASPGTSSTGSPASSDARFPPRVPKSFPFNTSVVYKKTLFVEFTDHLFNIAKPRPPWMGLLGPTIQAEVYDTVVITLKNMASHPVSLHAVGVSYWKASEGAEYDDQTSQREKEDDKVFPGGSHTYVWQVLKENGPMASDPLCLTYSYLSHVDLVKDLNSGLIGALLVCREGSLAKEKTQTLHKFILLFAVFDEGKSWHSETKNSLMQDRDAASARAWPKMHTVNGYVNRSLPGLIGCHRKSVYWHVIGMGTTPEVHSIFLEGHTFLVRNHRQASLEISPITFLTAQTLLMDLGQFLLFCHISSHQHDGMEAYVKVDSCPEEPQLRMKNNEEAEDYDDDLTDSEMDVVRFDDDNSPSFIQIRSVAKKHPKTWVHYIAAEEEDWDYAPLVLAPDGAPTSTEPSEGSAPGSPAGSPTSTEEGTSTEPSEGSAPGTSTEPSEGSAPGTSESATPESGPGTSTEPSEGSAPGTSESATPESGPGSEPATSGSETPGTSTEPSEGSAPGTSTEPSEGSAPGTSESATPESGPGTSESATPESGPGASSDRSYKSQYLNNGPQRIGRKYKKVRFMAYTDETFKTREAIQHESGILGPLLYGEVGDTLLIIFKNQASRPYNIYPHGITDVRPLYSRRLPKGVKHLKDFPILPGEIFKYKWTVTVEDGPTKSDPRCLTRYYSSFVNMERDLASGLIGPLLICYKESVDQRGNQIMSDKRNVILFSVFDENRSWYLTENIQRFLPNPAGVQLEDPEFQASNIMHSINGYVFDSLQLSVCLHEVAYWYILSIGAQTDFLSVFFSGYTFKHKMVYEDTLTLFPFSGETVFMSMENPGLWILGCHNSDFRNRGMTALLKVSSCDKNTGDYYEDSYEDISAYLLSKNNAIEPRSFSQNPPVLKRHQREITRTTLQSDQEEIDYDDTISVEMKKEDFDIYDEDENQSPRSFQKKTRHYFIAAVERLWDYGMSSSPHVLRNRAQSGSVPQFKKVVFQEFTDGSFTQPLYRGELNEHLGLLGPYIRAEVEDNIMVTFRNQASRPYSFYSSLISYEEDQRQGAEPRKNFVKPNETKTYFWKVQHHMAPTKDEFDCKAWAYFSDVDLEKDVHSGLIGPLLVCHTNTLNPAHGRQVTVQEFALFFTIFDETKSWYFTENMERNCRGAPTSESATPESGPGSEPATSGSETPGTSESATPESGPGSEPATSGSETPGTSESATPESGPGTSTEPSEGSAPGTSESATPESGPGSPAGSPTSTEEGSPAGSPTSTEEGSPAGSPTSTEEGTSESATPESGPGTSTEPSEGSAPGASSAPCNIQMEDPTFKENYRFHAINGYIMDTLPGLVMAQDQRIRWYLLSMGSNENIHSIHFSGHVFTVRKKEEYKMALYNLYPGVFETVEMLPSKAGIWRVECLIGEHLHAGMSTLFLVYSNKCQTPLGMASGHIRDFQITASGQYGQWAPKLARLHYSGSINAWSTKEPFSWIKVDLLAPMIIHGIKTQGARQKFSSLYISQFIIMYSLDGKKWQTYRGNSTGTLMVFFGNVDSSGIKHNIFNPPIIARYIRLHPTHYSIRSTLRMELMGCDLNSCSMPLGMESKAISDAQITASSYFTNMFATWSPSKARLHLQGRSNAWRPQVNNPKEWLQVDFQKTMKVTGVTTQGVKSLLTSMYVKEFLISSSQDGHQWTLFFQNGKVKVFQGNQDSFTPVVNSLDPPLLTRYLRIHPQSWVHQIALRMEVLGCEAQDLYGAPGTSESATPESGPGSEPATSGSETPGTSESATPESGPGSEPATSGSETPGTSESATPESGPGTSTEPSEGSAPGSPAGSPTSTEEGTSESATPESGPGSEPATSGSETPGTSESATPESGPGSPAGSPTSTEEGSPAGSPTSTEEGTSTEPSEGSAPGTSESATPESGPGTSESATPESGPGTSESATPESGPGSEPATSGSETPGSEPATSGSETPGSPAGSPTSTEEGTSTEPSEGSAPGTSTEPSEGSAPGSEPATSGSETPGTSESATPESGPGTSTEPSEGSAPASSEQKLISEEDLSPATGHHHHHH

SEQ ID NO: 1192 - DNA, 6612 bp, synthetic construct
  misc_feature 1..6612: note = Description of Artificial Sequence: Synthetic polynucleotide
  source 1..6612: mol_type = other DNA
gccaccagaagatactacctgggtgcagtggaactgtcatgggactatatgcaaagtgatctcggtgagctgcctgtgggcgcgccaggctccagcccctccgcgagcacgggaaccggaccaggttcgtcaccctcagcatcaacggggacgggaccgggggcgtcaccaggaacgtcctccaccggctcgccgggtgcatcacccggaacgtcatcgaccggatcgccagggagctcgacgccatcaggcgcaacaggatcacctggctcaagccctagcgcgtcaaccggcacgggtccgggtgcctcccctggcacgtccagcaccggatcacccggatcgagcccatccgcctcaaccggaaccggacccggtacaccagggtcgggaacagcctcctcgtcaccaggctcctcaaccccctcgggagccacgggttcgcccggttcgtcaacgccttccggagcaactggtagccccggagcatcgccaggaacttcgagcacggggtcgcccgcctcgagcgacgcaagatttcctcctagagtgccaaaatcttttccattcaacacctcagtcgtgtacaaaaagactctgtttgtagaattcacggatcaccttttcaacatcgctaagccaaggccaccctggatgggtctgctaggtcctaccatccaggctgaggtttatgatacagtggtcattacacttaagaacatggcttcccatcctgtcagtcttcatgctgttggtgtatcctactggaaagcttctgagggagctgaatatgatgatcagaccagtcaaagggagaaagaagatgataaagtcttccctggtggaagccatacatatgtctggcaggtcctgaaagagaatggtccaatggcctctgacccactgtgccttacctactcatatctttctcatgtggacctggtaaaagacttgaattcaggcctcattggagccctactagtatgtagagaagggagtctggccaaggaaaagacacagaccttgcacaaatttatactactttttgctgtatttgatgaagggaaaagttggcactcagaaacaaagaactccttgatgcaggatagggatgctgcatctgctcgggcctggcctaaaatgcacacagtcaatggttatgtaaacaggtctctgccaggtctgattggatgccacaggaaatcagtctattggcatgtgattggaatgggcaccactcctgaagtgcactcaatattcctcgaaggtcacacatttcttgtgaggaaccatcgccaggctagcttggaaatctcgccaataactttccttactgctcaaacactcttgatggaccttggacagtttctactgttttgtcatatctcttcccaccaacatgatggcatggaagcttatgtcaaagtagacagctgtccagaggaaccccaactacgaatgaaaaataatgaagaagcggaagactatgatgatgatcttactgattctgaaatggatgtggtcaggtttgatgatgacaactctccttcctttatccaaattcgctcagttgccaagaagcatcctaaaacttgggtacattacattgctgctgaagaggaggactgggactatgctcccttagtcctcgcccccgatggcgcgccaaccagtacggagccgtccgaggggagcgcaccaggaagcccggctgggagcccgacttctaccgaagagggtacatctaccgaaccaagtgaaggttcagcaccaggcacctcaacagaaccctctgagggctcggcgcctggtacaagtgagtccgccaccccagaatccgggcctgggacaagcacagaaccttcggaagggagtgcccctggaacatccgaatcggcaaccccagaatcagggccaggatctgagcccgcgacttcgggctccgagacgcctgggacatccaccgagccctccgaaggatcagccccaggcaccagcacggagccctctgagggaagcgcacctggtaccagcgaaagcgcaactcccgaatcaggtcccggtacgagcgagtcggcgaccccggagagcgggccaggtgcctcgagcgacagaagttataaaagtcaatatttgaacaatggccctcagcggattggtaggaagtacaaaaaagtccgatttatggcatacacagatgaaacctttaagactcgtgaagctattcagcatgaatcaggaatcttgggacctttactttatggggaagttggagacacactgttgattatatttaagaatcaagcaagcagaccatataacatctaccctcacggaatcactgatgtccgtcctttgtattcaaggagattaccaaaaggtgtaaaacatttgaaggattttccaattctgccaggagaaatattcaaatataaatggacagtgactgtagaagatgggccaactaaatcagatcctcggtgcctgacccgctattactctagtttcgttaatatggagagagatctagcttcaggactcattggccctctcctcatctgctacaaagaatctgtagatcaaagaggaaaccagataatgtcagacaagaggaatgtcatcctgttttctgtatttgatgagaaccgaagctggtacctcacagagaatatacaacgctttctccccaatccagctggagtgcagcttgaggatccagagttccaagcctccaacatcatgcacagcatcaatggctatgtttttgatagtttgcagttgtcagtttgtttgcatgaggtggcatactggtacattctaagcattggagcacagactgacttcctttctgtcttcttctctggatataccttcaaacacaaaatggtctatgaagacacactcaccctattcccattctcaggagaaactgtcttcatgtcgatggaaaacccaggtctatggattctggggtgccacaactcagactttcggaacagaggcatgaccgccttactgaaggtttctagttgtgacaagaacactggtgattattacgaggacagttatgaagatatttcagcatacttgctgagtaaaaacaatgccattgaaccaagaagcttctctcaaaacccaccagtcttgaaacgccatcaacgggaaataactcgtactactcttcagtcagatcaagaggaaatcgattatgatgataccatatcagttgaaatgaagaaggaagattttgacatttatgatgaggatgaaaatcagagcccccgcagctttcaaaagaaaacacgacactattttattgctgcagtggagaggctctgggattatgggatgagtagctccccacatgttctaagaaacagggctcagagtggcagtgtccctcagttcaagaaagttgttttccaggaatttactgatggctcctttactcagcccttataccgtggagaactaaatgaacatttgggactcctggggccatatataagagcagaagttgaagataatatcatggtaactttcagaaatcaggcctctcgtccctattccttctattctagccttatttcttatgaggaagatcagaggcaaggagcagaacctagaaaaaactttgtcaagcctaatgaaaccaaaacttacttttggaaagtgcaacatcatatggcacccactaaagatgagtttgactgcaaagcctgggcttatttctctgatgttgacctggaaaaagatgtgcactcaggcctgattggaccccttctggtctgccacactaacacactgaaccctgctcatgggagacaagtgacagtacaggaatttgctctgtttttcaccatctttgatgagaccaaaagctggtacttcactgaaaatatggaaagaaactgcaggggcgcgccaacgtccgaaagtgctacccctgagtcaggccctggtagtgagcctgccacaagcggaagcgaaactccggggacctcagagtctgccactcccgaatcggggccaggctctgaaccggccacttcagggagcgaaacaccaggaacatcggagagcgctaccccggagagcgggccaggaactagtactgagcctagcgagggaagtgcacctggtacaagcgagtccgccacacccgagtctggccctggctctccagcgggctcacccacgagcactgaagagggctctcccgctggcagcccaacgtcgacagaagaaggatcaccagcaggctcccccacatcaacagaggagggtacatcagaatctgctactcccgagagtggacccggtacctccactgagcccagcgaggggagtgcaccaggtgcctcgagcgctccctgcaatatccagatggaagatcccacttttaaagagaattatcgcttccatgcaatcaatggctacataatggatacactacctggcttagtaatggctcaggatcaaaggattcgatggtatctgctcagcatgggcagcaatgaaaacatccattctattcatttcagtggacatgtgttcactgtacgaaaaaaagaggagtataaaatggcactgtacaatctctatccaggtgtttttgagacagtggaaatgttaccatccaaagctggaatttggcgggtggaatgccttattggcgagcatctacatgctgggatgagcacactttttctggtgtacagcaataagtgtcagactcccctgggaatggcttctggacacattagagattttcagattacagcttcaggacaatatggacagtgggccccaaagctggccagacttcattattccggatcaatcaatgcctggagcaccaaggagcccttttcttggatcaaggtggatctgttggcaccaatgattattcacggcatcaagacccagggtgcccgtcagaagttctccagcctctacatctctcagtttatcatcatgtatagtcttgatgggaagaagtggcagacttatcgaggaaattccactggaaccttaatggtcttctttggcaatgtggattcatctgggataaaacacaatatttttaaccctccaattattgctcgatacatccgtttgcacccaactcattatagcattcgcagcactcttcgcatggagttgatgggctgtgatttaaatagttgcagcatgccattgggaatggagagtaaagcaatatcagatgcacagattactgcttcatcctactttaccaatatgtttgccacctggtctccttcaaaagctcgacttcacctccaagggaggagtaatgcctggagacctcaggtgaataatccaaaagagtggctgcaagtggacttccagaagacaatgaaagtcacaggagtaactactcagggagtaaaatctctgcttaccagcatgtatgtgaaggagttcctcatctccagcagtcaagatggccatcagtggactctcttttttcagaatggcaaagtaaaggtttttcagggaaatcaagactccttcacacctgtggtgaactctctagacccaccgttactgactcgctaccttcgaattcacccccagagttgggtgcaccagattgccctgaggatggaggttctgggctgcgaggcacaggacctctacggcgcgccaggtacctcagagtctgctacccccgagtcagggccaggatcagagccagccacctccgggtctgagacacccgggacttccgagagtgccacccctgagtccggacccgggtccgagcccgccacttccggctccgaaactcccggcacaagcgagagcgctaccccagagtcaggaccaggaacatctacagagccctctgaaggctccgctccagggtccccagccggcagtcccactagcaccgaggagggaacctctgaaagcgccacacccgaatcagggccagggtctgagcctgctaccagcggcagcgagacaccaggcacctctgagtccgccacaccagagtccggacccggatctcccgctgggagccccacctccactgaggagggatctcctgctggctctccaacatctactgaggaaggtacctcaaccgagccatccgagggatcagctcccggcacctcagagtcggcaaccccggagtctggacccggaacttccgaaagtgccacaccagagtccggtcccgggacttcagaatcagcaacacccgagtccggccctgggtctgaacccgccacaagtggtagtgagacaccaggatcagaacctgctacctcagggtcagagacacccggatctccggcaggctcaccaacctccactgaggagggcaccagcacagaaccaagcgagggctccgcacccggaacaagcactgaacccagtgagggttcagcacccggctctgagccggccacaagtggcagtgagacacccggcacttcagagagtgccacccccgagagtggcccaggcactagtaccgagccctctgaaggcagtgcgccagcctcgagcgaacaaaaactcatctcagaagaggatctgtcacctgcaaccggtcatcatcaccatcaccattga

SEQ ID NO: 1193 - protein, 2206 aa, synthetic construct
  REGION 1..2206: note = Description of Artificial Sequence: Synthetic polypeptide
ATRRYYLGAVELSWDYMQSDLGELPVDARFPPRVPKSFPFNTSVVYKKTLFVEFTDHLFNIAKPRPPWMGLLGPTIQAEVYDTVVITLKNMASHPVSLHAVGVSYWKASEGAEYDDQTSQREKEDDKVFPGGSHTYVWQVLKENGPMASDPLCLTYSYLSHVDLVKDLNSGLIGALLVCREGSLAKEKTQTLHKFILLFAVFDEGKSWHSETKNSLMQDRDAASARAWPKMHTVNGYVNRSLPGLIGCHRKSVYWHVIGMGTTPEVHSIFLEGHTFLVRNHRQASLEISPITFLTAQTLLMDLGQFLLFCHISSHQHDGMEAYVKVDSCPEEPQLRMKNNEEAEDYDDDLTDSEMDVVRFDDDNSPSFIQIRSVAKKHPKTWVHYIAAEEEDWDYAPLVLAPDGAPTSTEPSEGSAPGSPAGSPTSTEEGTSTEPSEGSAPGTSTEPSEGSAPGTSESATPESGPGTSTEPSEGSAPGTSESATPESGPGSEPATSGSETPGTSTEPSEGSAPGTSTEPSEGSAPGTSESATPESGPGTSESATPESGPGASSDRSYKSQYLNNGPQRIGRKYKKVRFMAYTDETFKTREAIQHESGILGPLLYGEVGDTLLIIFKNQASRPYNIYPHGITDVRPLYSRRLPKGVKHLKDFPILPGEIFKYKWTVTVEDGPTKSDPRCLTRYYSSFVNMERDLASGLIGPLLICYKESVDQRGNQIMSDKRNVILFSVFDENRSWYLTENIQRFLPNPAGVQLEDPEFQASNIMHSINGYVFDSLQLSVCLHEVAYWYILSIGAQTDFLSVFFSGYTFKHKMVYEDTLTLFPFSGETVFMSMENPGLWILGCHNSDFRNRGMTALLKVSSCDKNTGDYYEDSYEDISAYLLSKNNAIEPRSFSQNPPVLKRHQREITRTTLQGAPGTPGSGTASSSPGASPGTSSTGSPGASPGTSSTGSPGASPGTSSTGSPGSSPSASTGTGPGTPGSGTASSSPGASPGTSSTGSPGASPGTSSTGSPGASPGTSSTGSPGSSTPSGATGSPGSSTPSGATGSPGASPGTSSTGSPASSSDQEEIDYDDTISVEMKKEDFDIYDEDENQSPRSFQKKTRHYFIAAVERLWDYGMSSSPHVLRNRAQGAPGTPGSGTASSSPGASPGTSSTGSPGASPGTSSTGSPGASPGTSSTGSPGSSPSASTGTGPGTPGSGTASSSPGASPGTSSTGSPGASPGTSSTGSPGASPGTSSTGSPGSSTPSGATGSPGSSTPSGATGSPGASPGTSSTGSPASSRAQSGSVPQFKKVVFQEFTDGSFTQPLYRGELNEHLGLLGPYIRAEVEDNIMVTFRNQASRPYSFYSSLISYEEDQRQGAEPRKNFVKPNETKTYFWKVQHHMAPTKDEFDCKAWAYFSDVDLEKDVHSGLIGPLLVCHTNTLNPAHGRQVTVQEFALFFTIFDETKSWYFTENMERNCRAPCNIQMEDPTFKENYRFHAINGYIMDTLPGLVMAQDQRIRWYLLSMGSNENIHSIHFSGHVFTVRKKEEYKMALYNLYPGVFETVEMLPSKAGIWRVECLIGEHLHAGMSTLFLVYSNKCQTPLGMASGHIRDFQITASGQYGQWAPKLARLHYSGSINAWSTKEPFSWIKVDLLAPMIIHGIKTQGARQKFSSLYISQFIIMYSLDGKKWQTYRGNSTGTLMVFFGNVDSSGIKHNIFNPPIIARYIRLHPTHYSIRSTLRMELMGCDLNSCSMPLGMESKAISDAQITASSYFTNMFATWSPSKARLHLQGRSNAWRPQVNNPKEWLQVDFQKTMKVTGVTTQGVKSLLTSMYVKEFLISSSQDGHQWTLFFQNGKVKVFQGNQDSFTPVVNSLDPPLLTRYLRIHPQSWVHQIALRMEVLGCEAQDLYGAPGTSESATPESGPGSEPATSGSETPGTSESATPESGPGSEPATSGSETPGTSESATPESGPGTSTEPSEGSAPGSPAGSPTSTEEGTSESATPESGPGSEPATSGSETPGTSESATPESGPGSPAGSPTSTEEGSPAGSPTSTEEGTSTEPSEGSAPGTSESATPESGPGTSESATPESGPGTSESATPESGPGSEPATSGSETPGSEPATSGSETPGSPAGSPTSTEEGTSTEPSEGSAPGTSTEPSEGSAPGSEPATSGSETPGTSESATPESGPGTSTEPSEGSAPASSEQKLISEEDLSPATGHHHHHH

SEQ ID NO: 1194 - DNA, 6621 bp, synthetic construct
  misc_feature 1..6621: note = Description of Artificial Sequence: Synthetic polynucleotide
  source 1..6621: mol_type = other DNA
gccaccagaagatactacctgggtgcagtggaactgtcatgggactatatgcaaagtgatctcggtgagctgcctgtggacgcaagatttcctcctagagtgccaaaatcttttccattcaacacctcagtcgtgtacaaaaagactctgtttgtagaattcacggatcaccttttcaacatcgctaagccaaggccaccctggatgggtctgctaggtcctaccatccaggctgaggtttatgatacagtggtcattacacttaagaacatggcttcccatcctgtcagtcttcatgctgttggtgtatcctactggaaagcttctgagggagctgaatatgatgatcagaccagtcaaagggagaaagaagatgataaagtcttccctggtggaagccatacatatgtctggcaggtcctgaaagagaatggtccaatggcctctgacccactgtgccttacctactcatatctttctcatgtggacctggtaaaagacttgaattcaggcctcattggagccctactagtatgtagagaagggagtctggccaaggaaaagacacagaccttgcacaaatttatactactttttgctgtatttgatgaagggaaaagttggcactcagaaacaaagaactccttgatgcaggatagggatgctgcatctgctcgggcctggcctaaaatgcacacagtcaatggttatgtaaacaggtctctgccaggtctgattggatgccacaggaaatcagtctattggcatgtgattggaatgggcaccactcctgaagtgcactcaatattcctcgaaggtcacacatttcttgtgaggaaccatcgccaggctagcttggaaatctcgccaataactttccttactgctcaaacactcttgatggaccttggacagtttctactgttttgtcatatctcttcccaccaacatgatggcatggaagcttatgtcaaagtagacagctgtccagaggaaccccaactacgaatgaaaaataatgaagaagcggaagactatgatgatgatcttactgattctgaaatggatgtggtcaggtttgatgatgacaactctccttcctttatccaaattcgctcagttgccaagaagcatcctaaaacttgggtacattacattgctgctgaagaggaggactgggactatgctcccttagtcctcgcccccgatggcgcgccaaccagtacggagccgtccgaggggagcgcaccaggaagcccggctgggagcccgacttctaccgaagagggtacatctaccgaaccaagtgaaggttcagcaccaggcacctcaacagaaccctctgagggctcggcgcctggtacaagtgagtccgccaccccagaatccgggcctgggacaagcacagaaccttcggaagggagtgcccctggaacatccgaatcggcaaccccagaatcagggccaggatctgagcccgcgacttcgggctccgagacgcctgggacatccaccgagccctccgaaggatcagccccaggcaccagcacggagccctctgagggaagcgcacctggtaccagcgaaagcgcaactcccgaatcaggtcccggtacgagcgagtcggcgaccccggagagcgggccaggtgcctcgagcgacagaagttataaaagtcaatatttgaacaatggccctcagcggattggtaggaagtacaaaaaagtccgatttatggcatacacagatgaaacctttaagactcgtgaagctattcagcatgaatcaggaatcttgggacctttactttatggggaagttggagacacactgttgattatatttaagaatcaagcaagcagaccatataacatctaccctcacggaatcactgatgtccgtcctttgtattcaaggagattaccaaaaggtgtaaaacatttgaaggattttccaattctgccaggagaaatattcaaatataaatggacagtgactgtagaagatgggccaactaaatcagatcctcggtgcctgacccgctattactctagtttcgttaatatggagagagatctagcttcaggactcattggccctctcctcatctgctacaaagaatctgtagatcaaagaggaaaccagataatgtcagacaagaggaatgtcatcctgttttctgtatttgatgagaaccgaagctggtacctcacagagaatatacaacgctttctccccaatccagctggagtgcagcttgaggatccagagttccaagcctccaacatcatgcacagcatcaatggctatgtttttgatagtttgcagttgtcagtttgtttgcatgaggtggcatactggtacattctaagcattggagcacagactgacttcctttctgtcttcttctctggatataccttcaaacacaaaatggtctatgaagacacactcaccctattcccattctcaggagaaactgtcttcatgtcgatggaaaacccaggtctatggattctggggtgccacaactcagactttcggaacagaggcatgaccgccttactgaaggtttctagttgtgacaagaacactggtgattattacgaggacagttatgaagatatttcagcatacttgctgagtaaaaacaatgccattgaaccaagaagcttctctcaaaacccaccagtcttgaaacgccatcaacgggaaataactcgtactactcttcagggcgcgccaggtacacccggatcgggtacagcgtcatcgagccccggtgcgtcacctggtacgtcgagcacggggtcgccaggggcgtcccctgggacgtcctcaacaggctcgcccggtgcgtcacccggcacgtcgtccacgggttcacctggtagctccccttccgcgtccactggcaccgggcctggaactccggggagcggcacagcgagctcgtcgccgggagcatcgcctgggacatcgagcaccgggtcgccaggagcatcgcccggaacatccagcacaggaagccccggcgcgtcgcccgggacatcaagcacaggttccccgggatcgagcacgccgtccggagccactggatcaccagggagctcgacaccttccggcgcaacgggatcgcccggagccagcccgggtacgtcaagcactggctcccctgcctcgagctcagatcaagaggaaatcgattatgatgataccatatcagttgaaatgaagaaggaagattttgacatttatgatgaggatgaaaatcagagcccccgcagctttcaaaagaaaacacgacactattttattgctgcagtggagaggctctgggattatgggatgagtagctccccacatgttctaagaaacagggctcagggcgcgccaggtacacccggatcgggtacagcgtcatcgagccccggtgcgtcacctggtacgtcgagcacggggtcgccaggggcgtcccctgggacgtcctcaacaggctcgcccggtgcgtcacccggcacgtcgtccacgggttcacctggtagctccccttccgcgtccactggcaccgggcctggaactccggggagcggcacagcgagctcgtcgccgggagcatcgcctgggacatcgagcaccgggtcgccaggagcatcgcccggaacatccagcacaggaagccccggcgcgtcgcccgggacatcaagcacaggttccccgggatcgagcacgccgtccggagccactggatcaccagggagctcgacaccttccggcgcaacgggatcgcccggagccagcccgggtacgtcaagcactggctcccctgcctcgagcagggctcagagtggcagtgtccctcagttcaagaaagttgttttccaggaatttactgatggctcctttactcagcccttataccgtggagaactaaatgaacatttgggactcctggggccatatataagagcagaagttgaagataatatcatggtaactttcagaaatcaggcctctcgtccctattccttctattctagccttatttcttatgaggaagatcagaggcaaggagcagaacctagaaaaaactttgtcaagcctaatgaaaccaaaacttacttttggaaagtgcaacatcatatggcacccactaaagatgagtttgactgcaaagcctgggcttatttctctgatgttgacctggaaaaagatgtgcactcaggcctgattggaccccttctggtctgccacactaacacactgaaccctgctcatgggagacaagtgacagtacaggaatttgctctgtttttcaccatctttgatgagaccaaaagctggtacttcactgaaaatatggaaagaaactgcagggctccctgcaatatccagatggaagatcccacttttaaagagaattatcgcttccatgcaatcaatggctacataatggatacactacctggcttagtaatggctcaggatcaaaggattcgatggtatctgctcagcatgggcagcaatgaaaacatccattctattcatttcagtggacatgtgttcactgtacgaaaaaaagaggagtataaaatggcactgtacaatctctatccaggtgtttttgagacagtggaaatgttaccatccaaagctggaatttggcgggtggaatgccttattggcgagcatctacatgctgggatgagcacactttttctggtgtacagcaataagtgtcagactcccctgggaatggcttctggacacattagagattttcagattacagcttcaggacaatatggacagtgggccccaaagctggccagacttcattattccggatcaatcaatgcctggagcaccaaggagcccttttcttggatcaaggtggatctgttggcaccaatgattattcacggcatcaagacccagggtgcccgtcagaagttctccagcctctacatctctcagtttatcatcatgtatagtcttgatgggaagaagtggcagacttatcgaggaaattccactggaaccttaatggtcttctttggcaatgtggattcatctgggataaaacacaatatttttaaccctccaattattgctcgatacatccgtttgcacccaactcattatagcattcgcagcactcttcgcatggagttgatgggctgtgatttaaatagttgcagcatgccattgggaatggagagtaaagcaatatcagatgcacagattactgcttcatcctactttaccaatatgtttgccacctggtctccttcaaaagctcgacttcacctccaagggaggagtaatgcctggagacctcaggtgaataatccaaaagagtggctgcaagtggacttccagaagacaatgaaagtcacaggagtaactactcagggagtaaaatctctgcttaccagcatgtatgtgaaggagttcctcatctccagcagtcaagatggccatcagtggactctcttttttcagaatggcaaagtaaaggtttttcagggaaatcaagactccttcacacctgtggtgaactctctagacccaccgttactgactcgctaccttcgaattcacccccagagttgggtgcaccagattgccctgaggatggaggttctgggctgcgaggcacaggacctctacggcgcgccaggtacctcagagtctgctacccccgagtcagggccaggatcagagccagccacctccgggtctgagacacccgggacttccgagagtgccacccctgagtccggacccgggtccgagcccgccacttccggctccgaaactcccggcacaagcgagagcgctaccccagagtcaggaccaggaacatctacagagccctctgaaggctccgctccagggtccccagccggcagtcccactagcaccgaggagggaacctctgaaagcgccacacccgaatcagggccagggtctgagcctgctaccagcggcagcgagacaccaggcacctctgagtccgccacaccagagtccggacccggatctcccgctgggagccccacctccactgaggagggatctcctgctggctctccaacatctactgaggaaggtacctcaaccgagccatccgagggatcagctcccggcacctcagagtcggcaaccccggagtctggacccggaacttccgaaagtgccacaccagagtccggtcccgggacttcagaatcagcaacacccgagtccggccctgggtctgaacccgccacaagtggtagtgagacaccaggatcagaacctgctacctcagggtcagagacacccggatctccggcaggctcaccaacctccactgaggagggcaccagcacagaaccaagcgagggctccgcacccggaacaagcactgaacccagtgagggttcagcacccggctctgagccggccacaagtggcagtgagacacccggcacttcagagagtgccacccccgagagtggcccaggcactagtaccgagccctctgaaggcagtgcgccagcctcgagcgaacaaaaactcatctcagaagaggatctgtcacctgcaaccggtcatcatcaccatcaccattga

SEQ ID NO: 1195 - protein, 2203 aa, synthetic construct
  REGION 1..2203: note = Description of Artificial Sequence: Synthetic polypeptide
ATRRYYLGAVELSWDYMQSDLGELPVDARFPPRVPKSFPFNTSVVYKKTLFVEFTDHLFNIAKPRPPWMGLLGPTIQAEVYDTVVITLKNMASHPVSLHAVGVSYWKASEGAEYDDQTSQREKEDDKVFPGGSHTYVWQVLKENGPMASDPLCLTYSYLSHVDLVKDLNSGLIGALLVCREGSLAKEKTQTLHKFILLFAVFDEGKSWHSETKNSLMQDRDAASARAWPKMHTVNGYVNRSLPGLIGCHRKSVYWHVIGMGTTPEVHSIFLEGHTFLVRNHRQASLEISPITFLTAQTLLMDLGQFLLFCHISSHQHDGMEAYVKVDSCPEEPQLRMKNNEEAEDYDDDLTDSEMDVVRFDDDNSPSFIQIRSVAKKHPKTWVHYIAAEEEDWDYAPLVLAPDGAPTSTEPSEGSAPGSPAGSPTSTEEGTSTEPSEGSAPGTSTEPSEGSAPGTSESATPESGPGTSTEPSEGSAPGTSESATPESGPGSEPATSGSETPGTSTEPSEGSAPGTSTEPSEGSAPGTSESATPESGPGTSESATPESGPGASSDRSYKSQYLNNGPQRIGRKYKKVRFMAYTDETFKTREAIQHESGILGPLLYGEVGDTLLIIFKNQASRPYNIYPHGITDVRPLYSRRLPKGVKHLKDFPILPGEIFKYKWTVTVEDGPTKSDPRCLTRYYSSFVNMERDLASGLIGPLLICYKESVDQRGNQIMSDKRNVILFSVFDENRSWYLTENIQRFLPNPAGVQLEDPEFQASNIMHSINGYVFDSLQLSVCLHEVAYWYILSIGAQTDFLSVFFSGYTFKHKMVYEDTLTLFPFSGETVFMSMENPGLWILGCHNSDFRNRGMTALLKVSSCDKNTGDYYEDSYEDISAYLLSKNNAIEPRSFSQNPPVLKRHQREITRTTLQGAPGTPGSGTASSSPGASPGTSSTGSPGASPGTSSTGSPGASPGTSSTGSPGSSPSASTGTGPGTPGSGTASSSPGASPGTSSTGSPGASPGTSSTGSPGASPGTSSTGSPGSSTPSGATGSPGSSTPSGATGSPGASPGTSSTGSPASSSDQEEIDYDDTISVEMKKEDFDIYDEDENQSPRSFQKKTRHYFIAAVERLWDYGMSSSPHVLRNRAQSGSVPQFKKVVFQEFTDGSFTQPLYRGELNEHLGLLGPYIRAEVEDNIMVTFRNQASRPYSFYSSLISYEEDQRQGAEPRKNFVKPNETKTYFWKVQHHMAPTKDEFDCKAWAYFSDVDLEKDVHSGLIGPLLVCHTNTLNPAHGRQVTVQEFALFFTIFDETKSWYFTENMERNCRGAPTSESATPESGPGSEPATSGSETPGTSESATPESGPGSEPATSGSETPGTSESATPESGPGTSTEPSEGSAPGTSESATPESGPGSPAGSPTSTEEGSPAGSPTSTEEGSPAGSPTSTEEGTSESATPESGPGTSTEPSEGSAPGASSAPCNIQMEDPTFKENYRFHAINGYIMDTLPGLVMAQDQRIRWYLLSMGSNENIHSIHFSGHVFTVRKKEEYKMALYNLYPGVFETVEMLPSKAGIWRVECLIGEHLHAGMSTLFLVYSNKCQTPLGMASGHIRDFQITASGQYGQWAPKLARLHYSGSINAWSTKEPFSWIKVDLLAPMIIHGIKTQGARQKFSSLYISQFIIMYSLDGKKWQTYRGNSTGTLMVFFGNVDSSGIKHNIFNPPIIARYIRLHPTHYSIRSTLRMELMGCDLNSCSMPLGMESKAISDAQITASSYFTNMFATWSPSKARLHLQGRSNAWRPQVNNPKEWLQVDFQKTMKVTGVTTQGVKSLLTSMYVKEFLISSSQDGHQWTLFFQNGKVKVFQGNQDSFTPVVNSLDPPLLTRYLRIHPQSWVHQIALRMEVLGCEAQDLYGAPGTSESATPESGPGSEPATSGSETPGTSESATPESGPGSEPATSGSETPGTSESATPESGPGTSTEPSEGSAPGSPAGSPTSTEEGTSESATPESGPGSEPATSGSETPGTSESATPESGPGSPAGSPTSTEEGSPAGSPTSTEEGTSTEPSEGSAPGTSESATPESGPGTSESATPESGPGTSESATPESGPGSEPATSGSETPGSEPATSGSETPGSPAGSPTSTEEGTSTEPSEGSAPGTSTEPSEGSAPGSEPATSGSETPGTSESATPESGPGTSTEPSEGSAPASSEQKLISEEDLSPATGHHHHHH

SEQ ID NO: 1196 - DNA, 6612 bp, synthetic construct
  misc_feature 1..6612: note = Description of Artificial Sequence: Synthetic polynucleotide
  source 1..6612: mol_type = other DNA
gccaccagaagatactacctgggtgcagtggaactgtcatgggactatatgcaaagtgatctcggtgagctgcctgtggacgcaagatttcctcctagagtgccaaaatcttttccattcaacacctcagtcgtgtacaaaaagactctgtttgtagaattcacggatcaccttttcaacatcgctaagccaaggccaccctggatgggtctgctaggtcctaccatccaggctgaggtttatgatacagtggtcattacacttaagaacatggcttcccatcctgtcagtcttcatgctgttggtgtatcctactggaaagcttctgagggagctgaatatgatgatcagaccagtcaaagggagaaagaagatgataaagtcttccctggtggaagccatacatatgtctggcaggtcctgaaagagaatggtccaatggcctctgacccactgtgccttacctactcatatctttctcatgtggacctggtaaaagacttgaattcaggcctcattggagccctactagtatgtagagaagggagtctggccaaggaaaagacacagaccttgcacaaatttatactactttttgctgtatttgatgaagggaaaagttggcactcagaaacaaagaactccttgatgcaggatagggatgctgcatctgctcgggcctggcctaaaatgcacacagtcaatggttatgtaaacaggtctctgccaggtctgattggatgccacaggaaatcagtctattggcatgtgattggaatgggcaccactcctgaagtgcactcaatattcctcgaaggtcacacatttcttgtgaggaaccatcgccaggctagcttggaaatctcgccaataactttccttactgctcaaacactcttgatggaccttggacagtttctactgttttgtcatatctcttcccaccaacatgatggcatggaagcttatgtcaaagtagacagctgtccagaggaaccccaactacgaatgaaaaataatgaagaagcggaagactatgatgatgatcttactgattctgaaatggatgtggtcaggtttgatgatgacaactctccttcctttatccaaattcgctcagttgccaagaagcatcctaaaacttgggtacattacattgctgctgaagaggaggactgggactatgctcccttagtcctcgcccccgatggcgcgccaaccagtacggagccgtccgaggggagcgcaccaggaagcccggctgggagcccgacttctaccgaagagggtacatctaccgaaccaagtgaaggttcagcaccaggcacctcaacagaaccctctgagggctcggcgcctggtacaagtgagtccgccaccccagaatccgggcctgggacaagcacagaaccttcggaagggagtgcccctggaacatccgaatcggcaaccccagaatcagggccaggatctgagcccgcgacttcgggctccgagacgcctgggacatccaccgagccctccgaaggatcagccccaggcaccagcacggagccctctgagggaagcgcacctggtaccagcgaaagcgcaactcccgaatcaggtcccggtacgagcgagtcggcgaccccggagagcgggccaggtgcctcgagcgacagaagttataaaagtcaatatttgaacaatggccctcagcggattggtaggaagtacaaaaaagtccgatttatggcatacacagatgaaacctttaagactcgtgaagctattcagcatgaatcaggaatcttgggacctttactttatggggaagttggagacacactgttgattatatttaagaatcaagcaagcagaccatataacatctaccctcacggaatcactgatgtccgtcctttgtattcaaggagattaccaaaaggtgtaaaacatttgaaggattttccaattctgccaggagaaatattcaaatataaatggacagtgactgtagaagatgggccaactaaatcagatcctcggtgcctgacccgctattactctagtttcgttaatatggagagagatctagcttcaggactcattggccctctcctcatctgctacaaagaatctgtagatcaaagaggaaaccagataatgtcagacaagaggaatgtcatcctgttttctgtatttgatgagaaccgaagctggtacctcacagagaatatacaacgctttctccccaatccagctggagtgcagcttgaggatccagagttccaagcctccaacatcatgcacagcatcaatggctatgtttttgatagtttgcagttgtcagtttgtttgcatgaggtggcatactggtacattctaagcattggagcacagactgacttcctttctgtcttcttctctggatataccttcaaacacaaaatggtctatgaagacacactcaccctattcccattctcaggagaaactgtcttcatgtcgatggaaaacccaggtctatggattctggggtgccacaactcagactttcggaacagaggcatgaccgccttactgaaggtttctagttgtgacaagaacactggtgattattacgaggacagttatgaagatatttcagcatacttgctgagtaaaaacaatgccattgaaccaagaagcttctctcaaaacccaccagtcttgaaacgccatcaacgggaaataactcgtactactcttcagggcgcgccaggtacacccggatcgggtacagcgtcatcgagccccggtgcgtcacctggtacgtcgagcacggggtcgccaggggcgtcccctgggacgtcctcaacaggctcgcccggtgcgtcacccggcacgtcgtccacgggttcacctggtagctccccttccgcgtccactggcaccgggcctggaactccggggagcggcacagcgagctcgtcgccgggagcatcgcctgggacatcgagcaccgggtcgccaggagcatcgcccggaacatccagcacaggaagccccggcgcgtcgcccgggacatcaagcacaggttccccgggatcgagcacgccgtccggagccactggatcaccagggagctcgacaccttccggcgcaacgggatcgcccggagccagcccgggtacgtcaagcactggctcccctgcctcgagctcagatcaagaggaaatcgattatgatgataccatatcagttgaaatgaagaaggaagattttgacatttatgatgaggatgaaaatcagagcccccgcagctttcaaaagaaaacacgacactattttattgctgcagtggagaggctctgggattatgggatgagtagctccccacatgttctaagaaacagggctcagagtggcagtgtccctcagttcaagaaagttgttttccaggaatttactgatggctcctttactcagcccttataccgtggagaactaaatgaacatttgggactcctggggccatatataagagcagaagttgaagataatatcatggtaactttcagaaatcaggcctctcgtccctattccttctattctagccttatttcttatgaggaagatcagaggcaaggagcagaacctagaaaaaactttgtcaagcctaatgaaaccaaaacttacttttggaaagtgcaacatcatatggcacccactaaagatgagtttgactgcaaagcctgggcttatttctctgatgttgacctggaaaaagatgtgcactcaggcctgattggaccccttctggtctgccacactaacacactgaaccctgctcatgggagacaagtgacagtacaggaatttgctctgtttttcaccatctttgatgagaccaaaagctggtacttcactgaaaatatggaaagaaactgcaggggcgcgccaacgtccgaaagtgctacccctgagtcaggccctggtagtgagcctgccacaagcggaagcgaaactccggggacctcagagtctgccactcccgaatcggggccaggctctgaaccggccacttcagggagcgaaacaccaggaacatcggagagcgctaccccggagagcgggccaggaactagtactgagcctagcgagggaagtgcacctggtacaagcgagtccgccacacccgagtctggccctggctctccagcgggctcacccacgagcactgaagagggctctcccgctggcagcccaacgtcgacagaagaaggatcaccagcaggctcccccacatcaacagaggagggtacatcagaatctgctactcccgagagtggacccggtacctccactgagcccagcgaggggagtgcaccaggtgcctcgagcgctccctgcaatatccagatggaagatcccacttttaaagagaattatcgcttccatgcaatcaatggctacataatggatacactacctggcttagtaatggctcaggatcaaaggattcgatggtatctgctcagcatgggcagcaatgaaaacatccattctattcatttcagtggacatgtgttcactgtacgaaaaaaagaggagtataaaatggcactgtacaatctctatccaggtgtttttgagacagtggaaatgttaccatccaaagctggaatttggcgggtggaatgccttattggcgagcatctacatgctgggatgagcacactttttctggtgtacagcaataagtgtcagactcccctgggaatggcttctggacacattagagattttcagattacagcttcaggacaatatggacagtgggccccaaagctggccagacttcattattccggatcaatcaatgcctggagcaccaaggagcccttttcttggatcaaggtggatctgttggcaccaatgattattcacggcatcaagacccagggtgcccgtcagaagttctccagcctctacatctctcagtttatcatcatgtatagtcttgatgggaagaagtggcagacttatcgaggaaattccactggaaccttaatggtcttctttggcaatgtggattcatctgggataaaacacaatatttttaaccctccaattattgctcgatacatccgtttgcacccaactcattatagcattcgcagcactcttcgcatggagttgatgggctgtgatttaaatagttgcagcatgccattgggaatggagagtaaagcaatatcagatgcacagattactgcttcatcctactttaccaatatgtttgccacctggtctccttcaaaagctcgacttcacctccaagggaggagtaatgcctggagacctcaggtgaataatccaaaagagtggctgcaagtggacttccagaagacaatgaaagtcacaggagtaactactcagggagtaaaatctctgcttaccagcatgtatgtgaaggagttcctcatctccagcagtcaagatggccatcagtggactctcttttttcagaatggcaaagtaaaggtttttcagggaaatcaagactccttcacacctgtggtgaactctctagacccaccgttactgactcgctaccttcgaattcacccccagagttgggtgcaccagattgccctgaggatggaggttctgggctgcgaggcacaggacctctacggcgcgccaggtacctcagagtctgctacccccgagtcagggccaggatcagagccagccacctccgggtctgagacacccgggacttccgagagtgccacccctgagtccggacccgggtccgagcccgccacttccggctccgaaactcccggcacaagcgagagcgctaccccagagtcaggaccaggaacatctacagagccctctgaaggctccgctccagggtccccagccggcagtcccactagcaccgaggagggaacctctgaaagcgccacacccgaatcagggccagggtctgagcctgctaccagcggcagcgagacaccaggcacctctgagtccgccacaccagagtccggacccggatctcccgctgggagccccacctccactgaggagggatctcctgctggctctccaacatctactgaggaaggtacctcaaccgagccatccgagggatcagctcccggcacctcagagtcggcaaccccggagtctggacccggaacttccgaaagtgccacaccagagtccggtcccgggacttcagaatcagcaacacccgagtccggccctgggtctgaacccgccacaagtggtagtgagacaccaggatcagaacctgctacctcagggtcagagacacccggatctccggcaggctcaccaacctccactgaggagggcaccagcacagaaccaagcgagggctccgcacccggaacaagcactgaacccagtgagggttcagcacccggctctgagccggccacaagtggcagtgagacacccggcacttcagagagtgccacccccgagagtggcccaggcactagtaccgagccctctgaaggcagtgcgccagcctcgagcgaacaaaaactcatctcagaagaggatctgtcacctgcaaccggtcatcatcaccatcaccattga

SEQ ID NO: 1197 - protein, 2206 aa, synthetic construct
  REGION 1..2206: note = Description of Artificial Sequence: Synthetic polypeptide
ATRRYYLGAVELSWDYMQSDLGELPVDARFPPRVPKSFPFNTSVVYKKTLFVEFTDHLFNIAKPRPPWMGLLGPTIQAEVYDTVVITLKNMASHPVSLHAVGVSYWKASEGAEYDDQTSQREKEDDKVFPGGSHTYVWQVLKENGPMASDPLCLTYSYLSHVDLVKDLNSGLIGALLVCREGSLAKEKTQTLHKFILLFAVFDEGKSWHSETKNSLMQDRDAASARAWPKMHTVNGYVNRSLPGLIGCHRKSVYWHVIGMGTTPEVHSIFLEGHTFLVRNHRQASLEISPITFLTAQTLLMDLGQFLLFCHISSHQHDGMEAYVKVDSCPEEPQLRMKNNEEAEDYDDDLTDSEMDVVRFDDDNSPSFIQIRSVAKKHPKTWVHYIAAEEEDWDYAPLVLAPDGAPTSTEPSEGSAPGSPAGSPTSTEEGTSTEPSEGSAPGTSTEPSEGSAPGTSESATPESGPGTSTEPSEGSAPGTSESATPESGPGSEPATSGSETPGTSTEPSEGSAPGTSTEPSEGSAPGTSESATPESGPGTSESATPESGPGASSDRSYKSQYLNNGPQRIGRKYKKVRFMAYTDETFKTREAIQHESGILGPLLYGEVGDTLLIIFKNQASRPYNIYPHGITDVRPLYSRRLPKGVKHLKDFPILPGEIFKYKWTVTVEDGPTKSDPRCLTRYYSSFVNMERDLASGLIGPLLICYKESVDQRGNQIMSDKRNVILFSVFDENRSWYLTENIQRFLPNPAGVQLEDPEFQASNIMHSINGYVFDSLQLSVCLHEVAYWYILSIGAQTDFLSVFFSGYTFKHKMVYEDTLTLFPFSGETVFMSMENPGLWILGCHNSDFRNRGMTALLKVSSCDKNTGDYYEDSYEDISAYLLSKNNAIEPRSFSQNPPVLKRHQREITRTTLQSDQEEIDYDDTISVEMKKEDFDIYDEDENQSPRSFQKKTRHYFIAAVERLWDYGMSSSPHVLRNRAQGAPGTPGSGTASSSPGASPGTSSTGSPGASPGTSSTGSPGASPGTSSTGSPGSSPSASTGTGPGTPGSGTASSSPGASPGTSSTGSPGASPGTSSTGSPGASPGTSSTGSPGSSTPSGATGSPGSSTPSGATGSPGASPGTSSTGSPASSRAQSGSVPQFKKVVFQEFTDGSFTQPLYRGELNEHLGLLGPYIRAEVEDNIMVTFRNQASRPYSFYSSLISYEEDQRQGAEPRKNFVKPNETKTYFWKVQHHMAPTKDEFDCKAWAYFSDVDLEKDVHSGLIGPLLVCHTNTLNPAHGRQVTVQEFALFFTIFDETKSWYFTENMERNCRGAPTSESATPESGPGSEPATSGSETPGTSESATPESGPGSEPATSGSETPGTSESATPESGPGTSTEPSEGSAPGTSESATPESGPGSPAGSPTSTEEGSPAGSPTSTEEGSPAGSPTSTEEGTSESATPESGPGTSTEPSEGSAPGASSAPCNIQMEDPTFKENYRFHAINGYIMDTLPGLVMAQDQRIRWYLLSMGSNENIHSIHFSGHVFTVRKKEEYKMALYNLYPGVFETVEMLPSKAGIWRVECLIGEHLHAGMSTLFLVYSNKCQTPLGMASGHIRDFQITASGQYGQWAPKLARLHYSGSINAWSTKEPFSWIKVDLLAPMIIHGIKTQGARQKFSSLYISQFIIMYSLDGKKWQTYRGNSTGTLMVFFGNVDSSGIKHNIFNPPIIARYIRLHPTHYSIRSTLRMELMGCDLNSCSMPLGMESKAISDAQITASSYFTNMFATWSPSKARLHLQGRSNAWRPQVNNPKEWLQVDFQKTMKVTGVTTQGVKSLLTSMYVKEFLISSSQDGHQWTLFFQNGKVKVFQGNQDSFTPVVNSLDPPLLTRYLRIHPQSWVHQIALRMEVLGCEAQDLYGAPGTSESATPESGPGSEPATSGSETPGTSESATPESGPGSEPATSGSETPGTSESATPESGPGTSTEPSEGSAPGSPAGSPTSTEEGTSESATPESGPGSEPATSGSETPGTSESATPESGPGSPAGSPTSTEEGSPAGSPTSTEEGTSTEPSEGSAPGTSESATPESGPGTSESATPESGPGTSESATPESGPGSEPATSGSETPGSEPATSGSETPGSPAGSPTSTEEGTSTEPSEGSAPGTSTEPSEGSAPGSEPATSGSETPGTSESATPESGPGTSTEPSEGSAPASSEQKLISEEDLSPATGHHHHHH

SEQ ID NO: 1198 - DNA, 6621 bp, synthetic construct
  misc_feature 1..6621: note = Description of Artificial Sequence: Synthetic polynucleotide
  source 1..6621: mol_type = other DNA
gccaccagaagatactacctgggtgcagtggaactgtcatgggactatatgcaaagtgatctcggtgagctgcctgtggacgcaagatttcctcctagagtgccaaaatcttttccattcaacacctcagtcgtgtacaaaaagactctgtttgtagaattcacggatcaccttttcaacatcgctaagccaaggccaccctggatgggtctgctaggtcctaccatccaggctgaggtttatgatacagtggtcattacacttaagaacatggcttcccatcctgtcagtcttcatgctgttggtgtatcctactggaaagcttctgagggagctgaatatgatgatcagaccagtcaaagggagaaagaagatgataaagtcttccctggtggaagccatacatatgtctggcaggtcctgaaagagaatggtccaatggcctctgacccactgtgccttacctactcatatctttctcatgtggacctggtaaaagacttgaattcaggcctcattggagccctactagtatgtagagaagggagtctggccaaggaaaagacacagaccttgcacaaatttatactactttttgctgtatttgatgaagggaaaagttggcactcagaaacaaagaactccttgatgcaggatagggatgctgcatctgctcgggcctggcctaaaatgcacacagtcaatggttatgtaaacaggtctctgccaggtctgattggatgccacaggaaatcagtctattggcatgtgattggaatgggcaccactcctgaagtgcactcaatattcctcgaaggtcacacatttcttgtgaggaaccatcgccaggctagcttggaaatctcgccaataactttccttactgctcaaacactcttgatggaccttggacagtttctactgttttgtcatatctcttcccaccaacatgatggcatggaagcttatgtcaaagtagacagctgtccagaggaaccccaactacgaatgaaaaataatgaagaagcggaagactatgatgatgatcttactgattctgaaatggatgtggtcaggtttgatgatgacaactctccttcctttatccaaattcgctcagttgccaagaagcatcctaaaacttgggtacattacattgctgctgaagaggaggactgggactatgctcccttagtcctcgcccccgatggcgcgccaaccagtacggagccgtccgaggggagcgcaccaggaagcccggctgggagcccgacttctaccgaagagggtacatctaccgaaccaagtgaaggttcagcaccaggcacctcaacagaaccctctgagggctcggcgcctggtacaagtgagtccgccaccccagaatccgggcctgggacaagcacagaaccttcggaagggagtgcccctggaacatccgaatcggcaaccccagaatcagggccaggatctgagcccgcgacttcgggctccgagacgcctgggacatccaccgagccctccgaaggatcagccccaggcaccagcacggagccctctgagggaagcgcacctggtaccagcgaaagcgcaactcccgaatcaggtcccggtacgagcgagtcggcgaccccggagagcgggccaggtgcctcgagcgacagaagttataaaagtcaatatttgaacaatggccctcagcggattggtaggaagtacaaaaaagtccgatttatggcatacacagatgaaacctttaagactcgtgaagctattcagcatgaatcaggaatcttgggacctttactttatggggaagttggagacacactgttgattatatttaagaatcaagcaagcagaccatataacatctaccctcacggaatcactgatgtccgtcctttgtattcaaggagattaccaaaaggtgtaaaacatttgaaggattttccaattctgccaggagaaatattcaaatataaatggacagtgactgtagaagatgggccaactaaatcagatcctcggtgcctgacccgctattactctagtttcgttaatatggagagagatctagcttcaggactcattggccctctcctcatctgctacaaagaatctgtagatcaaagaggaaaccagataatgtcagacaagaggaatgtcatcctgttttctgtatttgatgagaaccgaagctggtacctcacagagaatatacaacgctttctccccaatccagctggagtgcagcttgaggatccagagttccaagcctccaacatcatgcacagcatcaatggctatgtttttgatagtttgcagttgtcagtttgtttgcatgaggtggcatactggtacattctaagcattggagcacagactgacttcctttctgtcttcttctctggatataccttcaaacacaaaatggtctatgaagacacactcaccctattcccattctcaggagaaactgtcttcatgtcgatggaaaacccaggtctatggattctggggtgccacaactcagactttcggaacagaggcatgaccgccttactgaaggtttctagttgtgacaagaacactggtgattattacgaggacagttatgaagatatttcagcatacttgctgagtaaaaacaatgccattgaaccaagaagcttctctcaaaacccaccagtcttgaaacgccatcaacgggaaataactcgtactactcttcagtcagatcaagaggaaatcgattatgatgataccatatcagttgaaatgaagaaggaagattttgacatttatgatgaggatgaaaatcagagcccccgcagctttcaaaagaaaacacgacactattttattgctgcagtggagaggctctgggattatgggatgagtagctccccacatgttctaagaaacagggctcagggcgcgccaggtacacccggatcgggtacagcgtcatcgagccccggtgcgtcacctggtacgtcgagcacggggtcgccaggggcgtcccctgggacgtcctcaacaggctcgcccggtgcgtcacccggcacgtcgtccacgggttcacctggtagctccccttccgcgtccactggcaccgggcctggaactccggggagcggcacagcgagctcgtcgccgggagcatcgcctgggacatcgagcaccgggtcgccaggagcatcgcccggaacatccagcacaggaagccccggcgcgtcgcccgggacatcaagcacaggttccccgggatcgagcacgccgtccggagccactggatcaccagggagctcgacaccttccggcgcaacgggatcgcccggagccagcccgggtacgtcaagcactggctcccctgcctcgagcagggctcagagtggcagtgtccctcagttcaagaaagttgttttccaggaatttactgatggctcctttactcagcccttataccgtggagaactaaatgaacatttgggactcctggggccatatataagagcagaagttgaagataatatcatggtaactttcagaaatcaggcctctcgtccctattccttctattctagccttatttcttatgaggaagatcagaggcaaggagcagaacctagaaaaaactttgtcaagcctaatgaaaccaaaacttacttttggaaagtgcaacatcatatggcacccactaaagatgagtttgactgcaaagcctgggcttatttctctgatgttgacctggaaaaagatgtgcactcaggcctgattggaccccttctggtctgccacactaacacactgaaccctgctcatgggagacaagtgacagtacaggaatttgctctgtttttcaccatctttgatgagaccaaaagctggtacttcactgaaaatatggaaagaaactgcaggggcgcgccaacgtccgaaagtgctacccctgagtcaggccctggtagtgagcctgccacaagcggaagcgaaactccggggacctcagagtctgccactcccgaatcggggccaggctctgaaccggccacttcagggagcgaaacaccaggaacatcggagagcgctaccccggagagcgggccaggaactagtactgagcctagcgagggaagtgcacctggtacaagcgagtccgccacacccgagtctggccctggctctccagcgggctcacccacgagcactgaagagggctctcccgctggcagcccaacgtcgacagaagaaggatcaccagcaggctcccccacatcaacagaggagggtacatcagaatctgctactcccgagagtggacccggtacctccactgagcccagcgaggggagtgcaccaggtgcctcgagcgctccctgcaatatccagatggaagatcccacttttaaagagaattatcgcttccatgcaatcaatggctacataatggatacactacctggcttagtaatggctcaggatcaaaggattcgatggtatctgctcagcatgggcagcaatgaaaacatccattctattcatttcagtggacatgtgttcactgtacgaaaaaaagaggagtataaaatggcactgtacaatctctatccaggtgtttttgagacagtggaaatgttaccatccaaagctggaatttggcgggtggaatgccttattggcgagcatctacatgctgggatgagcacactttttctggtgtacagcaataagtgtcagactcccctgggaatggcttctggacacattagagattttcagattacagcttcaggacaatatggacagtgggccccaaagctggccagacttcattattccggatcaatcaatgcctggagcaccaaggagcccttttcttggatcaaggtggatctgttggcaccaatgattattcacggcatcaagacccagggtgcccgtcagaagttctccagcctctacatctctcagtttatcatcatgtatagtcttgatgggaagaagtggcagacttatcgaggaaattccactggaaccttaatggtcttctttggcaatgtggattcatctgggataaaacacaatatttttaaccctccaattattgctcgatacatccgtttgcacccaactcattatagcattcgcagcactcttcgcatggagttgatgggctgtgatttaaatagttgcagcatgccattgggaatggagagtaaagcaatatcagatgcacagattactgcttcatcctactttaccaatatgtttgccacctggtctccttcaaaagctcgacttcacctccaagggaggagtaatgcctggagacctcaggtgaataatccaaaagagtggctgcaagtggacttccagaagacaatgaaagtcacaggagtaactactcagggagtaaaatctctgcttaccagcatgtatgtgaaggagttcctcatctccagcagtcaagatggccatcagtggactctcttttttcagaatggcaaagtaaaggtttttcagggaaatcaagactccttcacacctgtggtgaactctctagacccaccgttactgactcgctaccttcgaattcacccccagagttgggtgcaccagattgccctgaggatggaggttctgggctgcgaggcacaggacctctacggcgcgccaggtacctcagagtctgctacccccgagtcagggccaggatcagagccagccacctccgggtctgagacacccgggacttccgagagtgccacccctgagtccggacccgggtccgagcccgccacttccggctccgaaactcccggcacaagcgagagcgctaccccagagtcaggaccaggaacatctacagagccctctgaaggctccgctccagggtccccagccggcagtcccactagcaccgaggagggaacctctgaaagcgccacacccgaatcagggccagggtctgagcctgctaccagcggcagcgagacaccaggcacctctgagtccgccacaccagagtccggacccggatctcccgctgggagccccacctccactgaggagggatctcctgctggctctccaacatctactgaggaaggtacctcaaccgagccatccgagggatcagctcccggcacctcagagtcggcaaccccggagtctggacccggaacttccgaaagtgccacaccagagtccggtcccgggacttcagaatcagcaacacccgagtccggccctgggtctgaacccgccacaagtggtagtgagacaccaggatcagaacctgctacctcagggtcagagacacccggatctccggcaggctcaccaacctccactgaggagggcaccagcacagaaccaagcgagggctccgcacccggaacaagcactgaacccagtgagggttcagcacccggctctgagccggccacaagtggcagtgagacacccggcacttcagagagtgccacccccgagagtggcccaggcactagtaccgagccctctgaaggcagtgcgccagcctcgagcgaacaaaaactcatctcagaagaggatctgtcacctgcaaccggtcatcatcaccatcaccattga

SEQ ID NO: 1199 - protein, 2206 aa, synthetic construct
  REGION 1..2206: note = Description of Artificial Sequence: Synthetic polypeptide
ATRRYYLGAVELSWDYMQSDLGELPVDARFPPRVPKSFPFNTSVVYKKTLFVEFTDHLFNIAKPRPPWMGLLGPTIQAEVYDTVVITLKNMASHPVSLHAVGVSYWKASEGAEYDDQTSQREKEDDKVFPGGSHTYVWQVLKENGPMASDPLCLTYSYLSHVDLVKDLNSGLIGALLVCREGSLAKEKTQTLHKFILLFAVFDEGKSWHSETKNSLMQDRDAASARAWPKMHTVNGYVNRSLPGLIGCHRKSVYWHVIGMGTTPEVHSIFLEGHTFLVRNHRQASLEISPITFLTAQTLLMDLGQFLLFCHISSHQHDGMEAYVKVDSCPEEPQLRMKNNEEAEDYDDDLTDSEMDVVRFDDDNSPSFIQIRSVAKKHPKTWVHYIAAEEEDWDYAPLVLAPDDRSYKSQYLNNGPQRIGRKYKKVRFMAYTDETFKTREAIQHESGILGPLLYGEVGDTLLIIFKNQASRPYNIYPHGITDVRPLYSRRLPKGVKHLKDFPILPGEIFKYKWTVTVEDGPTKSDPRCLTRYYSSFVNMERDLASGLIGPLLICYKESVDQRGNQIMSDKRNVILFSVFDENRSWYLTENIQRFLPNPAGVQLEDPEFQASNIMHSINGYVFDSLQLSVCLHEVAYWYILSIGAQTDFLSVFFSGYTFKHKMVYEDTLTLFPFSGETVFMSMENPGLWILGCHNSDFRNRGMTALLKVSSCDKNTGDYYEDSYEDISAYLLSKNNAIEPRSFSQNPPVLKRHQREITRTTLQGAPGTPGSGTASSSPGASPGTSSTGSPGASPGTSSTGSPGASPGTSSTGSPGSSPSASTGTGPGTPGSGTASSSPGASPGTSSTGSPGASPGTSSTGSPGASPGTSSTGSPGSSTPSGATGSPGSSTPSGATGSPGASPGTSSTGSPASSSDQEEIDYDDTISVEMKKEDFDIYDEDENQSPRSFQKKTRHYFIAAVERLWDYGMSSSPHVLRNRAQGAPGTPGSGTASSSPGASPGTSSTGSPGASPGTSSTGSPGASPGTSSTGSPGSSPSASTGTGPGTPGSGTASSSPGASPGTSSTGSPGASPGTSSTGSPGASPGTSSTGSPGSSTPSGATGSPGSSTPSGATGSPGASPGTSSTGSPASSRAQSGSVPQFKKVVFQEFTDGSFTQPLYRGELNEHLGLLGPYIRAEVEDNIMVTFRNQASRPYSFYSSLISYEEDQRQGAEPRKNFVKPNETKTYFWKVQHHMAPTKDEFDCKAWAYFSDVDLEKDVHSGLIGPLLVCHTNTLNPAHGRQVTVQEFALFFTIFDETKSWYFTENMERNCRGAPTSESATPESGPGSEPATSGSETPGTSESATPESGPGSEPATSGSETPGTSESATPESGPGTSTEPSEGSAPGTSESATPESGPGSPAGSPTSTEEGSPAGSPTSTEEGSPAGSPTSTEEGTSESATPESGPGTSTEPSEGSAPGASSAPCNIQMEDPTFKENYRFHAINGYIMDTLPGLVMAQDQRIRWYLLSMGSNENIHSIHFSGHVFTVRKKEEYKMALYNLYPGVFETVEMLPSKAGIWRVECLIGEHLHAGMSTLFLVYSNKCQTPLGMASGHIRDFQITASGQYGQWAPKLARLHYSGSINAWSTKEPFSWIKVDLLAPMIIHGIKTQGARQKFSSLYISQFIIMYSLDGKKWQTYRGNSTGTLMVFFGNVDSSGIKHNIFNPPIIARYIRLHPTHYSIRSTLRMELMGCDLNSCSMPLGMESKAISDAQITASSYFTNMFATWSPSKARLHLQGRSNAWRPQVNNPKEWLQVDFQKTMKVTGVTTQGVKSLLTSMYVKEFLISSSQDGHQWTLFFQNGKVKVFQGNQDSFTPVVNSLDPPLLTRYLRIHPQSWVHQIALRMEVLGCEAQDLYGAPGTSESATPESGPGSEPATSGSETPGTSESATPESGPGSEPATSGSETPGTSESATPESGPGTSTEPSEGSAPGSPAGSPTSTEEGTSESATPESGPGSEPATSGSETPGTSESATPESGPGSPAGSPTSTEEGSPAGSPTSTEEGTSTEPSEGSAPGTSESATPESGPGTSESATPESGPGTSESATPESGPGSEPATSGSETPGSEPATSGSETPGSPAGSPTSTEEGTSTEPSEGSAPGTSTEPSEGSAPGSEPATSGSETPGTSESATPESGPGTSTEPSEGSAPASSEQKLISEEDLSPATGHHHHHH

SEQ ID NO: 1200 - DNA, 6621 bp, synthetic construct
  misc_feature 1..6621: note = Description of Artificial Sequence: Synthetic polynucleotide
  source 1..6621: mol_type = other DNA
gccaccagaagatactacctgggtgcagtggaactgtcatgggactatatgcaaagtgatctcggtgagctgcctgtggacgcaagatttcctcctagagtgccaaaatcttttccattcaacacctcagtcgtgtacaaaaagactctgtttgtagaattcacggatcaccttttcaacatcgctaagccaaggccaccctggatgggtctgctaggtcctaccatccaggctgaggtttatgatacagtggtcattacacttaagaacatggcttcccatcctgtcagtcttcatgctgttggtgtatcctactggaaagcttctgagggagctgaatatgatgatcagaccagtcaaagggagaaagaagatgataaagtcttccctggtggaagccatacatatgtctggcaggtcctgaaagagaatggtccaatggcctctgacccactgtgccttacctactcatatctttctcatgtggacctggtaaaagacttgaattcaggcctcattggagccctactagtatgtagagaagggagtctggccaaggaaaagacacagaccttgcacaaatttatactactttttgctgtatttgatgaagggaaaagttggcactcagaaacaaagaactccttgatgcaggatagggatgctgcatctgctcgggcctggcctaaaatgcacacagtcaatggttatgtaaacaggtctctgccaggtctgattggatgccacaggaaatcagtctattggcatgtgattggaatgggcaccactcctgaagtgcactcaatattcctcgaaggtcacacatttcttgtgaggaaccatcgccaggctagcttggaaatctcgccaataactttccttactgctcaaacactcttgatggaccttggacagtttctactgttttgtcatatctcttcccaccaacatgatggcatggaagcttatgtcaaagtagacagctgtccagaggaaccccaactacgaatgaaaaataatgaagaagcggaagactatgatgatgatcttactgattctgaaatggatgtggtcaggtttgatgatgacaactctccttcctttatccaaattcgctcagttgccaagaagcatcctaaaacttgggtacattacattgctgctgaagaggaggactgggactatgctcccttagtcctcgcccccgatgacagaagttataaaagtcaatatttgaacaatggccctcagcggattggtaggaagtacaaaaaagtccgatttatggcatacacagatgaaacctttaagactcgtgaagctattcagcatgaatcaggaatcttgggacctttactttatggggaagttggagacacactgttgattatatttaagaatcaagcaagcagaccatataacatctaccctcacggaatcactgatgtccgtcctttgtattcaaggagattaccaaaaggtgtaaaacatttgaaggattttccaattctgccaggagaaatattcaaatataaatggacagtgactgtagaagatgggccaactaaatcagatcctcggtgcctgacccgctattactctagtttcgttaatatggagagagatctagcttcaggactcattggccctctcctcatctgctacaaagaatctgtagatcaaagaggaaaccagataatgtcagacaagaggaatgtcatcctgttttctgtatttgatgagaaccgaagctggtacctcacagagaatatacaacgctttctccccaatccagctggagtgcagcttgaggatccagagttccaagcctccaacatcatgcacagcatcaatggctatgtttttgatagtttgcagttgtcagtttgtttgcatgaggtggcatactggtacattctaagcattggagcacagactgacttcctttctgtcttcttctctggatataccttcaaacacaaaatggtctatgaagacacactcaccctattcccattctcaggagaaactgtcttcatgtcgatggaaaacccaggtctatggattctggggtgccacaactcagactttcggaacagaggcatgaccgccttactgaaggtttctagttgtgacaagaacactggtgattattacgaggacagttatgaagatatttcagcatacttgctgagtaaaaacaatgccattgaaccaagaagcttctctcaaaacccaccagtcttgaaacgccatcaacgggaaataactcgtactactcttcagggcgcgccaggtacacccggatcgggtacagcgtcatcgagccccggtgcgtcacctggtacgtcgagcacggggtcgccaggggcgtcccctgggacgtcctcaacaggctcgcccggtgcgtcacccggcacgtcgtccacgggttcacctggtagctccccttccgcgtccactggcaccgggcctggaactccggggagcggcacagcgagctcgtcgccgggagcatcgcctgggacatcgagcaccgggtcgccaggagcatcgcccggaacatccagcacaggaagccccggcgcgtcgcccgggacatcaagcacaggttccccgggatcgagcacgccgtccggagccactggatcaccagggagctcgacaccttccggcgcaacgggatcgcccggagccagcccgggtacgtcaagcactggctcccctgcctcgagctcagatcaagaggaaatcgattatgatgataccatatcagttgaaatgaagaaggaagattttgacatttatgatgaggatgaaaatcagagcccccgcagctttcaaaagaaaacacgacactattttattgctgcagtggagaggctctgggattatgggatgagtagctccccacatgttctaagaaacagggctcagggcgcgccaggtacacccggatcgggtacagcgtcatcgagccccggtgcgtcacctggtacgtcgagcacggggtcgccaggggcgtcccctgggacgtcctcaacaggctcgcccggtgcgtcacccggcacgtcgtccacgggttcacctggtagctccccttccgcgtccactggcaccgggcctggaactccggggagcggcacagcgagctcgtcgccgggagcatcgcctgggacatcgagcaccgggtcgccaggagcatcgcccggaacatccagcacaggaagccccggcgcgtcgcccgggacatcaagcacaggttccccgggatcgagcacgccgtccggagccactggatcaccagggagctcgacaccttccggcgcaacgggatcgcccggagccagcccgggtacgtcaagcactggctcccctgcctcgagcagggctcagagtggcagtgtccctcagttcaagaaagttgttttccaggaatttactgatggctcctttactcagcccttataccgtggagaactaaatgaacatttgggactcctggggccatatataagagcagaagttgaagataatatcatggtaactttcagaaatcaggcctctcgtccctattccttctattctagccttatttcttatgaggaagatcagaggcaaggagcagaacctagaaaaaactttgtcaagcctaatgaaaccaaaacttacttttggaaagtgcaacatcatatggcacccactaaagatgagtttgactgcaaagcctgggcttatttctctgatgttgacctggaaaaagatgtgcactcaggcctgattggaccccttctggtctgccacactaacacactgaaccctgctcatgggagacaagtgacagtacaggaatttgctctgtttttcaccatctttgatgagaccaaaagctggtacttcactgaaaatatggaaagaaactgcaggggcgcgccaacgtccgaaagtgctacccctgagtcaggccctggtagtgagcctgccacaagcggaagcgaaactccggggacctcagagtctgccactcccgaatcggggccaggctctgaaccggccacttcagggagcgaaacaccaggaacatcggagagcgctaccccggagagcgggccaggaactagtactgagcctagcgagggaagtgcacctggtacaagcgagtccgccacacccgagtctggccctggctctccagcgggctcacccacgagcactgaagagggctctcccgctggcagcccaacgtcgacagaagaaggatcaccagcaggctcccccacatcaacagaggagggtacatcagaatctgctactcccgagagtggacccggtacctccactgagcccagcgaggggagtgcaccaggtgcctcgagcgctccctgcaatatccagatggaagatcccacttttaaagagaattatcgcttccatgcaatcaatggctacataatggatacactacctggcttagtaatggctcaggatcaaaggattcgatggtatctgctcagcatgggcagcaatgaaaacatccattctattcatttcagtggacatgtgttcactgtacgaaaaaaagaggagtataaaatggcactgtacaatctctatccaggtgtttttgagacagtggaaatgttaccatccaaagctggaatttggcgggtggaatgccttattggcgagcatctacatgctgggatgagcacactttttctggtgtacagcaataagtgtcagactcccctgggaatggcttctggacacattagagattttcagattacagcttcaggacaatatggacagtgggccccaaagctggccagacttcattattccggatcaatcaatgcctggagcaccaaggagcccttttcttggatcaaggtggatctgttggcaccaatgattattcacggcatcaagacccagggtgcccgtcagaagttctccagcctctacatctctcagtttatcatcatgtatagtcttgatgggaagaagtggcagacttatcgaggaaattccactggaaccttaatggtcttctttggcaatgtggattcatctgggataaaacacaatatttttaaccctccaattattgctcgatacatccgtttgcacccaactcattatagcattcgcagcactcttcgcatggagttgatgggctgtgatttaaatagttgcagcatgccattgggaatggagagtaaagcaatatcagatgcacagattactgcttcatcctactttaccaatatgtttgccacctggtctccttcaaaagctcgacttcacctccaagggaggagtaatgcctggagacctcaggtgaataatccaaaagagtggctgcaagtggacttccagaagacaatgaaagtcacaggagtaactactcagggagtaaaatctctgcttaccagcatgtatgtgaaggagttcctcatctccagcagtcaagatggccatcagtggactctcttttttcagaatggcaaagtaaaggtttttcagggaaatcaagactccttcacacctgtggtgaactctctagacccaccgttactgactcgctaccttcgaattcacccccagagttgggtgcaccagattgccctgaggatggaggttctgggctgcgaggcacaggacctctacggcgcgccaggtacctcagagtctgctacccccgagtcagggccaggatcagagccagccacctccgggtctgagacacccgggacttccgagagtgccacccctgagtccggacccgggtccgagcccgccacttccggctccgaaactcccggcacaagcgagagcgctaccccagagtcaggaccaggaacatctacagagccctctgaaggctccgctccagggtccccagccggcagtcccactagcaccgaggagggaacctctgaaagcgccacacccgaatcagggccagggtctgagcctgctaccagcggcagcgagacaccaggcacctctgagtccgccacaccagagtccggacccggatctcccgctgggagccccacctccactgaggagggatctcctgctggctctccaacatctactgaggaaggtacctcaaccgagccatccgagggatcagctcccggcacctcagagtcggcaaccccggagtctggacccggaacttccgaaagtgccacaccagagtccggtcccgggacttcagaatcagcaacacccgagtccggccctgggtctgaacccgccacaagtggtagtgagacaccaggatcagaacctgctacctcagggtcagagacacccggatctccggcaggctcaccaacctccactgaggagggcaccagcacagaaccaagcgagggctccgcacccggaacaagcactgaacccagtgagggttcagcacccggctctgagccggccacaagtggcagtgagacacccggcacttcagagagtgccacccccgagagtggcccaggcactagtaccgagccctctgaaggcagtgcgccagcctcgagcgaacaaaaactcatctcagaagaggatctgtcacctgcaaccggtcatcatcaccatcaccattga

SEQ ID NO: 1201 - protein, 2356 aa, synthetic construct
  REGION 1..2356: note = Description of Artificial Sequence: Synthetic polypeptide
ATRRYYLGAVELSWDYMQSDLGELPVDARFPPRVPKSFPFNTSVVYKKTLFVEFTDHLFNIAKPRPPWMGLLGPTIQAEVYDTVVITLKNMASHPVSLHAVGVSYWKASEGAEYDDQTSQREKEDDKVFPGGSHTYVWQVLKENGPMASDPLCLTYSYLSHVDLVKDLNSGLIGALLVCREGSLAKEKTQTLHKFILLFAVFDEGKSWHSETKNSLMQDRDAASARAWPKMHTVNGYVNRSLPGLIGCHRKSVYWHVIGMGTTPEVHSIFLEGHTFLVRNHRQASLEISPITFLTAQTLLMDLGQFLLFCHISSHQHDGMEAYVKVDSCPEEPQLRMKNNEEAEDYDDDLTDSEMDVVRFDDDNSPSFIQIRSVAKKHPKTWVHYIAAEEEDWDYAPLVLAPDGAPTSTEPSEGSAPGSPAGSPTSTEEGTSTEPSEGSAPGTSTEPSEGSAPGTSESATPESGPGTSTEPSEGSAPGTSESATPESGPGSEPATSGSETPGTSTEPSEGSAPGTSTEPSEGSAPGTSESATPESGPGTSESATPESGPGASSDRSYKSQYLNNGPQRIGRKYKKVRFMAYTDETFKTREAIQHESGILGPLLYGEVGDTLLIIFKNQASRPYNIYPHGITDVRPLYSRRLPKGVKHLKDFPILPGEIFKYKWTVTVEDGPTKSDPRCLTRYYSSFVNMERDLASGLIGPLLICYKESVDQRGNQIMSDKRNVILFSVFDENRSWYLTENIQRFLPNPAGVQLEDPEFQASNIMHSINGYVFDSLQLSVCLHEVAYWYILSIGAQTDFLSVFFSGYTFKHKMVYEDTLTLFPFSGETVFMSMENPGLWILGCHNSDFRNRGMTALLKVSSCDKNTGDYYEDSYEDISAYLLSKNNAIEPRSFSQNPPVLKRHQREITRTTLQGAPGTPGSGTASSSPGASPGTSSTGSPGASPGTSSTGSPGASPGTSSTGSPGSSPSASTGTGPGTPGSGTASSSPGASPGTSSTGSPGASPGTSSTGSPGASPGTSSTGSPGSSTPSGATGSPGSSTPSGATGSPGASPGTSSTGSPASSSDQEEIDYDDTISVEMKKEDFDIYDEDENQSPRSFQKKTRHYFIAAVERLWDYGMSSSPHVLRNRAQGAPGTPGSGTASSSPGASPGTSSTGSPGASPGTSSTGSPGASPGTSSTGSPGSSPSASTGTGPGTPGSGTASSSPGASPGTSSTGSPGASPGTSSTGSPGASPGTSSTGSPGSSTPSGATGSPGSSTPSGATGSPGASPGTSSTGSPASSRAQSGSVPQFKKVVFQEFTDGSFTQPLYRGELNEHLGLLGPYIRAEVEDNIMVTFRNQASRPYSFYSSLISYEEDQRQGAEPRKNFVKPNETKTYFWKVQHHMAPTKDEFDCKAWAYFSDVDLEKDVHSGLIGPLLVCHTNTLNPAHGRQVTVQEFALFFTIFDETKSWYFTENMERNCRGAPTSESATPESGPGSEPATSGSETPGTSESATPESGPGSEPATSGSETPGTSESATPESGPGTSTEPSEGSAPGTSESATPESGPGSPAGSPTSTEEGSPAGSPTSTEEGSPAGSPTSTEEGTSESATPESGPGTSTEPSEGSAPGASSAPCNIQMEDPTFKENYRFHAINGYIMDTLPGLVMAQDQRIRWYLLSMGSNENIHSIHFSGHVFTVRKKEEYKMALYNLYPGVFETVEMLPSKAGIWRVECLIGEHLHAGMSTLFLVYSNKCQTPLGMASGHIRDFQITASGQYGQWAPKLARLHYSGSINAWSTKEPFSWIKVDLLAPMIIHGIKTQGARQKFSSLYISQFIIMYSLDGKKWQTYRGNSTGTLMVFFGNVDSSGIKHNIFNPPIIARYIRLHPTHYSIRSTLRMELMGCDLNSCSMPLGMESKAISDAQITASSYFTNMFATWSPSKARLHLQGRSNAWRPQVNNPKEWLQVDFQKTMKVTGVTTQGVKSLLTSMYVKEFLISSSQDGHQWTLFFQNGKVKVFQGNQDSFTPVVNSLDPPLLTRYLRIHPQSWVHQIALRMEVLGCEAQDLYGAPGTSESATPESGPGSEPATSGSETPGTSESATPESGPGSEPATSGSETPGTSESATPESGPGTSTEPSEGSAPGSPAGSPTSTEEGTSESATPESGPGSEPATSGSETPGTSESATPESGPGSPAGSPTSTEEGSPAGSPTSTEEGTSTEPSEGSAPGTSESATPESGPGTSESATPESGPGTSESATPESGPGSEPATSGSETPGSEPATSGSETPGSPAGSPTSTEEGTSTEPSEGSAPGTSTEPSEGSAPGSEPATSGSETPGTSESATPESGPGTSTEPSEGSAPASSEQKLISEEDLSPATGHHHHHH

SEQ ID NO: 1202 - DNA, 7071 bp, synthetic construct
  misc_feature 1..7071: note = Description of Artificial Sequence: Synthetic polynucleotide
  source 1..7071: mol_type = other DNA
gccaccagaagatactacctgggtgcagtggaactgtcatgggactatatgcaaagtgatctcggtgagctgcctgtggacgcaagatttcctcctagagtgccaaaatcttttccattcaacacctcagtcgtgtacaaaaagactctgtttgtagaattcacggatcaccttttcaacatcgctaagccaaggccaccctggatgggtctgctaggtcctaccatccaggctgaggtttatgatacagtggtcattacacttaagaacatggcttcccatcctgtcagtcttcatgctgttggtgtatcctactggaaagcttctgagggagctgaatatgatgatcagaccagtcaaagggagaaagaagatgataaagtcttccctggtggaagccatacatatgtctggcaggtcctgaaagagaatggtccaatggcctctgacccactgtgccttacctactcatatctttctcatgtggacctggtaaaagacttgaattcaggcctcattggagccctactagtatgtagagaagggagtctggccaaggaaaagacacagaccttgcacaaatttatactactttttgctgtatttgatgaagggaaaagttggcactcagaaacaaagaactccttgatgcaggatagggatgctgcatctgctcgggcctggcctaaaatgcacacagtcaatggttatgtaaacaggtctctgccaggtctgattggatgccacaggaaatcagtctattggcatgtgattggaatgggcaccactcctgaagtgcactcaatattcctcgaaggtcacacatttcttgtgaggaaccatcgccaggctagcttggaaatctcgccaataactttccttactgctcaaacactcttgatggaccttggacagtttctactgttttgtcatatctcttcccaccaacatgatggcatggaagcttatgtcaaagtagacagctgtccagaggaaccccaactacgaatgaaaaataatgaagaagcggaagactatgatgatgatcttactgattctgaaatggatgtggtcaggtttgatgatgacaactctccttcctttatccaaattcgctcagttgccaagaagcatcctaaaacttgggtacattacattgctgctgaagaggaggactgggactatgctcccttagtcctcgcccccgatggcgcgccaaccagtacggagccgtccgaggggagcgcaccaggaagcccggctgggagcccgacttctaccgaagagggtacatctaccgaaccaagtgaaggttcagcaccaggcacctcaacagaaccctctgagggctcggcgcctggtacaagtgagtccgccaccccagaatccgggcctgggacaagcacagaaccttcggaagggagtgcccctggaacatccgaatcggcaaccccagaatcagggccaggatctgagcccgcgacttcgggctccgagacgcctgggacatccaccgagccctccgaaggatcagccccaggcaccagcacggagccctctgagggaagcgcacctggtaccagcgaaagcgcaactcccgaatcaggtcccggtacgagcgagtcggcgaccccggagagcgggccaggtgcctcgagcgacagaagttataaaagtcaatatttgaacaatggccctcagcggattggtaggaagtacaaaaaagtccgatttatggcatacacagatgaaacctttaagactcgtgaagctattcagcatgaatcaggaatcttgggacctttactttatggggaagttggagacacactgttgattatatttaagaatcaagcaagcagaccatataacatctaccctcacggaatcactgatgtccgtcctttgtattcaaggagattaccaaaaggtgtaaaacatttgaaggattttccaattctgccaggagaaatattcaaatataaatggacagtgactgtagaagatgggccaactaaatcagatcctcggtgcctgacccgctattactctagtttcgttaatatggagagagatctagcttcaggactcattggccctctcctcatctgctacaaagaatctgtagatcaaagaggaaaccagataatgtcagacaagaggaatgtcatcctgttttctgtatttgatgagaaccgaagctggtacctcacagagaatatacaacgctttctccccaatccagctggagtgcagcttgaggatccagagttccaagcctccaacatcatgcacagcatcaatggctatgtttttgatagtttgcagttgtcagtttgtttgcatgaggtggcatactggtacattctaagcattggagcacagactgacttcctttctgtcttcttctctggatataccttcaaacacaaaatggtctatgaagacacactcaccctattcccattctcaggagaaactgtcttcatgtcgatggaaaacccaggtctatggattctggggtgccacaactcagactttcggaacagaggcatgaccgccttactgaaggtttctagttgtgacaagaacactggtgattattacgaggacagttatgaagatatttcagcatacttgctgagtaaaaacaatgccattgaaccaagaagcttctctcaaaacccaccagtcttgaaacgccatcaacgggaaataactcgtactactcttcagggcgcgccaggtacacccggatcgggtacagcgtcatcgagccccggtgcgtcacctggtacgtcgagcacggggtcgccaggggcgtcccctgggacgtcctcaacaggctcgcccggtgcgtcacccggcacgtcgtccacgggttcacctggtagctccccttccgcgtccactggcaccgggcctggaactccggggagcggcacagcgagctcgtcgccgggagcatcgcctgggacatcgagcaccgggtcgccaggagcatcgcccggaacatccagcacaggaagccccggcgcgtcgcccgggacatcaagcacaggttccccgggatcgagcacgccgtccggagccactggatcaccagggagctcgacaccttccggcgcaacgggatcgcccggagccagcccgggtacgtcaagcactggctcccctgcctcgagctcagatcaagaggaaatcgattatgatgataccatatcagttgaaatgaagaaggaagattttgacatttatgatgaggatgaaaatcagagcccccgcagctttcaaaagaaaacacgacactattttattgctgcagtggagaggctctgggattatgggatgagtagctccccacatgttctaagaaacagggctcagggcgcgccaggtacacccggatcgggtacagcgtcatcgagccccggtgcgtcacctggtacgtcgagcacggggtcgccaggggcgtcccctgggacgtcctcaacaggctcgcccggtgcgtcacccggcacgtcgtccacgggttcacctggtagctccccttccgcgtccactggcaccgggcctggaactccggggagcggcacagcgagctcgtcgccgggagcatcgcctgggacatcgagcaccgggtcgccaggagcatcgcccggaacatccagcacaggaagccccggcgcgtcgcccgggacatcaagcacaggttccccgggatcgagcacgccgtccggagccactggatcaccagggagctcgacaccttccggcgcaacgggatcgcccggagccagcccgggtacgtcaagcactggctcccctgcctcgagcagggctcagagtggcagtgtccctcagttcaagaaagttgttttccaggaatttactgatggctcctttactcagcccttataccgtggagaactaaatgaacatttgggactcctggggccatatataagagcagaagttgaagataatatcatggtaactttcagaaatcaggcctctcgtccctattccttctattctagccttatttcttatgaggaagatcagaggcaaggagcagaacctagaaaaaactttgtcaagcctaatgaaaccaaaacttacttttggaaagtgcaacatcatatggcacccactaaagatgagtttgactgcaaagcctgggcttatttctctgatgttgacctggaaaaagatgtgcactcaggcctgattggaccccttctggtctgccacactaacacactgaaccctgctcatgggagacaagtgacagtacaggaatttgctctgtttttcaccatctttgatgagaccaaaagctggtacttcactgaaaatatggaaagaaactgcaggggcgcgccaacgtccgaaagtgctacccctgagtcaggccctggtagtgagcctgccacaagcggaagcgaaactccggggacctcagagtctgccactcccgaatcggggccaggctctgaaccggccacttcagggagcgaaacaccaggaacatcggagagcgctaccccggagagcgggccaggaactagtactgagcctagcgagggaagtgcacctggtacaagcgagtccgccacacccgagtctggccctggctctccagcgggctcacccacgagcactgaagagggctctcccgctggcagcccaacgtcgacagaagaaggatcaccagcaggctcccccacatcaacagaggagggtacatcagaatctgctactcccgagagtggacccggtacctccactgagcccagcgaggggagtgcaccaggtgcctcgagcgctccctgcaatatccagatggaagatcccacttttaaagagaattatcgcttccatgcaatcaatggctacataatggatacactacctggcttagtaatggctcaggatcaaaggattcgatggtatctgctcagcatgggcagcaatgaaaacatccattctattcatttcagtggacatgtgttcactgtacgaaaaaaagaggagtataaaatggcactgtacaatctctatccaggtgtttttgagacagtggaaatgttaccatccaaagctggaatttggcgggtggaatgccttattggcgagcatctacatgctgggatgagcacactttttctggtgtacagcaataagtgtcagactcccctgggaatggcttctggacacattagagattttcagattacagcttcaggacaatatggacagtgggccccaaagctggccagacttcattattccggatcaatcaatgcctggagcaccaaggagcccttttcttggatcaaggtggatctgttggcaccaatgattattcacggcatcaagacccagggtgcccgtcagaagttctccagcctctacatctctcagtttatcatcatgtatagtcttgatgggaagaagtggcagacttatcgaggaaattccactggaaccttaatggtcttctttggcaatgtggattcatctgggataaaacacaatatttttaaccctccaattattgctcgatacatccgtttgcacccaactcattatagcattcgcagcactcttcgcatggagttgatgggctgtgatttaaatagttgcagcatgccattgggaatggagagtaaagcaatatcagatgcacagattactgcttcatcctactttaccaatatgtttgccacctggtctccttcaaaagctcgacttcacctccaagggaggagtaatgcctggagacctcaggtgaataatccaaaagagtggctgcaagtggacttccagaagacaatgaaagtcacaggagtaactactcagggagtaaaatctctgcttaccagcatgtatgtgaaggagttcctcatctccagcagtcaagatggccatcagtggactctcttttttcagaatggcaaagtaaaggtttttcagggaaatcaagactccttcacacctgtggtgaactctctagacccaccgttactgactcgctaccttcgaattcacccccagagttgggtgcaccagattgccctgaggatggaggttctgggctgcgaggcacaggacctctacggcgcgccaggtacctcagagtctgctacccccgagtcagggccaggatcagagccagccacctccgggtctgagacacccgggacttccgagagtgccacccctgagtccggacccgggtccgagcccgccacttccggctccgaaactcccggcacaagcgagagcgctaccccagagtcaggaccaggaacatctacagagccctctgaaggctccgctccagggtccccagccggcagtcccactagcaccgaggagggaacctctgaaagcgccacacccgaatcagggccagggtctgagcctgctaccagcggcagcgagacaccaggcacctctgagtccgccacaccagagtccggacccggatctcccgctgggagccccacctccactgaggagggatctcctgctggctctccaacatctactgaggaaggtacctcaaccgagccatccgagggatcagctcccggcacctcagagtcggcaaccccggagtctggacccggaacttccgaaagtgccacaccagagtccggtcccgggacttcagaatcagcaacacccgagtccggccctgggtctgaacccgccacaagtggtagtgagacaccaggatcagaacctgctacctcagggtcagagacacccggatctccggcaggctcaccaacctccactgaggagggcaccagcacagaaccaagcgagggctccgcacccggaacaagcactgaacccagtgagggttcagcacccggctctgagccggccacaagtggcagtgagacacccggcacttcagagagtgccacccccgagagtggcccaggcactagtaccgagccctctgaaggcagtgcgccagcctcgagcgaacaaaaactcatctcagaagaggatctgtcacctgcaaccggtcatcatcaccatcaccattga

SEQ ID NO: 1203 - protein, 2203 aa, synthetic construct
  REGION 1..2203: note = Description of Artificial Sequence: Synthetic polypeptide
ATRRYYLGAVELSWDYMQSDLGELPVDARFPPRVPKSFPFGAPGSSPSASTGTGPGSSPSASTGTGPGASPGTSSTGSPGASPGTSSTGSPGSSTPSGATGSPGSSPSASTGTGPGASPGTSSTGSPGSSPSASTGTGPGTPGSGTASSSPGSSTPSGATGSPGSSTPSGATGSPGASPGTSSTGSPASSNTSVVYKKTLFVEFTDHLFNIAKPRPPWMGLLGPTIQAEVYDTVVITLKNMASHPVSLHAVGVSYWKASEGAEYDDQTSQREKEDDKVFPGGSHTYVWQVLKENGPMASDPLCLTYSYLSHVDLVKDLNSGLIGALLVCREGSLAKEKTQTLHKFILLFAVFDEGKSWHSETKNSLMQDRDAASARAWPKMHTVNGYVNRSLPGLIGCHRKSVYWHVIGMGTTPEVHSIFLEGHTFLVRNHRQASLEISPITFLTAQTLLMDLGQFLLFCHISSHQHDGMEAYVKVDSCPEEPQLRMKNNEEAEDYDDDLTDSEMDVVRFDDDNSPSFIQIRSVAKKHPKTWVHYIAAEEEDWDYAPLVLAPDGAPTSTEPSEGSAPGSPAGSPTSTEEGTSTEPSEGSAPGTSTEPSEGSAPGTSESATPESGPGTSTEPSEGSAPGTSESATPESGPGSEPATSGSETPGTSTEPSEGSAPGTSTEPSEGSAPGTSESATPESGPGTSESATPESGPGASSDRSYKSQYLNNGPQRIGRKYKKVRFMAYTDETFKTREAIQHESGILGPLLYGEVGDTLLIIFKNQASRPYNIYPHGITDVRPLYSRRLPKGVKHLKDFPILPGEIFKYKWTVTVEDGPTKSDPRCLTRYYSSFVNMERDLASGLIGPLLICYKESVDQRGNQIMSDKRNVILFSVFDENRSWYLTENIQRFLPNPAGVQLEDPEFQASNIMHSINGYVFDSLQLSVCLHEVAYWYILSIGAQTDFLSVFFSGYTFKHKMVYEDTLTLFPFSGETVFMSMENPGLWILGCHNSDFRNRGMTALLKVSSCDKNTGDYYEDSYEDISAYLLSKNNAIEPRSFSQNGAPSPAGSPTSTEEGTSESATPESGPGSEPATSGSETPGTSESATPESGPGTSTEPSEGSAPGTSTEPSEGSAPGTSTEPSEGSAPGTSTEPSEGSAPGTSTEPSEGSAPGTSTEPSEGSAPGSPAGSPTSTEEGTSTEPSEGSAPGASSPPVLKRHQAEITRTTLQSDQEEIDYDDTISVEMKKEDFDIYDEDENQSPRSFQKKTRHYFIAAVERLWDYGMSSSPHVLRNRAQSGSVPQFKKVVFQEFTDGSFTQPLYRGELNEHLGLLGPYIRAEVEDNIMVTFRNQASRPYSFYSSLISYEEDQRQGAEPRKNFVKPNETKTYFWKVQHHMAPTKDEFDCKAWAYFSDVDLEKDVHSGLIGPLLVCHTNTLNPAHGRQVTVQEFALFFTIFDETKSWYFTENMERNCRAPCNIQMEDPTFKENYRFHAINGYIMDTLPGLVMAQDQRIRWYLLSMGSNENIHSIHFSGHVFTVRKKEEYKMALYNLYPGVFETVEMLPSKAGIWRVECLIGEHLHAGMSTLFLVYSNKCQTPLGMASGHIRDFQITASGQYGQWAPKLARLHYSGSINAWSTKEPFSWIKVDLLAPMIIHGIKTQGARQKFSSLYISQFIIMYSLDGKKWQTYRGNSTGTLMVFFGNVDSSGIKHNIFNPPIIARYIRLHPTHYSIRSTLRMELMGCDLNSCSMPLGMESKAISDAQITASSYFTNMFATWSPSKARLHLQGRSNAWRPQVNNPKEWLQVDFQKTMKVTGVTTQGVKSLLTSMYVKEFLISSSQDGHQWTLFFQNGKVKVFQGNQDSFTPVVNSLDPPLLTRYLRIHPQSWVHQIALRMEVLGCEAQDLYGAPGTSESATPESGPGSEPATSGSETPGTSESATPESGPGSEPATSGSETPGTSESATPESGPGTSTEPSEGSAPGSPAGSPTSTEEGTSESATPESGPGSEPATSGSETPGTSESATPESGPGSPAGSPTSTEEGSPAGSPTSTEEGTSTEPSEGSAPGTSESATPESGPGTSESATPESGPGTSESATPESGPGSEPATSGSETPGSEPATSGSETPGSPAGSPTSTEEGTSTEPSEGSAPGTSTEPSEGSAPGSEPATSGSETPGTSESATPESGPGTSTEPSEGSAPASSEQKLISEEDLSPATGHHHHHH

SEQ ID NO: 1204 - DNA, 6612 bp, synthetic construct
  misc_feature 1..6612: note = Description of Artificial Sequence: Synthetic polynucleotide
  source 1..6612: mol_type = other DNA
gccaccagaagatactacctgggtgcagtggaactgtcatgggactatatgcaaagtgatctcggtgagctgcctgtggacgcaagatttcctcctagagtgccaaaatcttttccattcggcgcgccaggctccagcccctccgcgagcacgggaaccggaccaggttcgtcaccctcagcatcaacggggacgggaccgggggcgtcaccaggaacgtcctccaccggctcgccgggtgcatcacccggaacgtcatcgaccggatcgccagggagctcgacgccatcaggcgcaacaggatcacctggctcaagccctagcgcgtcaaccggcacgggtccgggtgcctcccctggcacgtccagcaccggatcacccggatcgagcccatccgcctcaaccggaaccggacccggtacaccagggtcgggaacagcctcctcgtcaccaggctcctcaaccccctcgggagccacgggttcgcccggttcgtcaacgccttccggagcaactggtagccccggagcatcgccaggaacttcgagcacggggtcgcccgcctcgagcaacacctcagtcgtgtacaaaaagactctgtttgtagaattcacggatcaccttttcaacatcgctaagccaaggccaccctggatgggtctgctaggtcctaccatccaggctgaggtttatgatacagtggtcattacacttaagaacatggcttcccatcctgtcagtcttcatgctgttggtgtatcctactggaaagcttctgagggagctgaatatgatgatcagaccagtcaaagggagaaagaagatgataaagtcttccctggtggaagccatacatatgtctggcaggtcctgaaagagaatggtccaatggcctctgacccactgtgccttacctactcatatctttctcatgtggacctggtaaaagacttgaattcaggcctcattggagccctactagtatgtagagaagggagtctggccaaggaaaagacacagaccttgcacaaatttatactactttttgctgtatttgatgaagggaaaagttggcactcagaaacaaagaactccttgatgcaggatagggatgctgcatctgctcgggcctggcctaaaatgcacacagtcaatggttatgtaaacaggtctctgccaggtctgattggatgccacaggaaatcagtctattggcatgtgattggaatgggcaccactcctgaagtgcactcaatattcctcgaaggtcacacatttcttgtgaggaaccatcgccaggctagcttggaaatctcgccaataactttccttactgctcaaacactcttgatggaccttggacagtttctactgttttgtcatatctcttcccaccaacatgatggcatggaagcttatgtcaaagtagacagctgtccagaggaaccccaactacgaatgaaaaataatgaagaagcggaagactatgatgatgatcttactgattctgaaatggatgtggtcaggtttgatgatgacaactctccttcctttatccaaattcgctcagttgccaagaagcatcctaaaacttgggtacattacattgctgctgaagaggaggactgggactatgctcccttagtcctcgcccccgatggcgcgccaaccagtacggagccgtccgaggggagcgcaccaggaagcccggctgggagcccgacttctaccgaagagggtacatctaccgaaccaagtgaaggttcagcaccaggcacctcaacagaaccctctgagggctcggcgcctggtacaagtgagtccgccaccccagaatccgggcctgggacaagcacagaaccttcggaagggagtgcccctggaacatccgaatcggcaaccccagaatcagggccaggatctgagcccgcgacttcgggctccgagacgcctgggacatccaccgagccctccgaaggatcagccccaggcaccagcacggagccctctgagggaagcgcacctggtaccagcgaaagcgcaactcccgaatcaggtcccggtacgagcgagtcggcgaccccggagagcgggccaggtgcctcgagcgacagaagttataaaagtcaatatttgaacaatggccctcagcggattggtaggaagtacaaaaaagtccgatttatggcatacacagatgaaacctttaagactcgtgaagctattcagcatgaatcaggaatcttgggacctttactttatggggaagttggagacacactgttgattatatttaagaatcaagcaagcagaccatataacatctaccctcacggaatcactgatgtccgtcctttgtattcaaggagattaccaaaaggtgtaaaacatttgaaggattttccaattctgccaggagaaatattcaaatataaatggacagtgactgtagaagatgggccaactaaatcagatcctcggtgcctgacccgctattactctagtttcgttaatatggagagagatctagcttcaggactcattggccctctcctcatctgctacaaagaatctgtagatcaaagaggaaaccagataatgtcagacaagaggaatgtcatcctgttttctgtatttgatgagaaccgaagctggtacctcacagagaatatacaacgctttctccccaatccagctggagtgcagcttgaggatccagagttccaagcctccaacatcatgcacagcatcaatggctatgtttttgatagtttgcagttgtcagtttgtttgcatgaggtggcatactggtacattctaagcattggagcacagactgacttcctttctgtcttcttctctggatataccttcaaacacaaaatggtctatgaagacacactcaccctattcccattctcaggagaaactgtcttcatgtcgatggaaaacccaggtctatggattctggggtgccacaactcagactttcggaacagaggcatgaccgccttactgaaggtttctagttgtgacaagaacactggtgattattacgaggacagttatgaagatatttcagcatacttgctgagtaaaaacaatgccattgaaccaagaagcttctctcaaaacggcgcgccaagtcccgctggaagcccaactagcaccgaagaggggacctcagagtccgccacccccgagtccggccctggctctgagcctgccactagcggctccgagactcctggcacatccgaaagcgctacacccgagagtggacccggcacctctaccgagcccagtgagggctccgcccctggaacaagcaccgagcccagcgaaggcagcgccccagggacctccacagagcccagtgaaggcagtgctcctggcaccagcaccgaaccaagcgagggctctgcacccgggacctccaccgagccaagcgaaggctctgcccctggcacttccaccgagcccagcgaaggcagcgcccctgggagccccgctggctctcccaccagcactgaggagggcacatctaccgaaccaagtgaaggctctgcaccaggtgcctcgagcccaccagtcttgaaacgccatcaagctgaaataactcgtactactcttcagtcagatcaagaggaaatcgattatgatgataccatatcagttgaaatgaagaaggaagattttgacatttatgatgaggatgaaaatcagagcccccgcagctttcaaaagaaaacacgacactattttattgctgcagtggagaggctctgggattatgggatgagtagctccccacatgttctaagaaacagggctcagagtggcagtgtccctcagttcaagaaagttgttttccaggaatttactgatggctcctttactcagcccttataccgtggagaactaaatgaacatttgggactcctggggccatatataagagcagaagttgaagataatatcatggtaactttcagaaatcaggcctctcgtccctattccttctattctagccttatttcttatgaggaagatcagaggcaaggagcagaacctagaaaaaactttgtcaagcctaatgaaaccaaaacttacttttggaaagtgcaacatcatatggcacccactaaagatgagtttgactgcaaagcctgggcttatttctctgatgttgacctggaaaaagatgtgcactcaggcctgattggaccccttctggtctgccacactaacacactgaaccctgctcatgggagacaagtgacagtacaggaatttgctctgtttttcaccatctttgatgagaccaaaagctggtacttcactgaaaatatggaaagaaactgcagggctccctgcaatatccagatggaagatcccacttttaaagagaattatcgcttccatgcaatcaatggctacataatggatacactacctggcttagtaatggctcaggatcaaaggattcgatggtatctgctcagcatgggcagcaatgaaaacatccattctattcatttcagtggacatgtgttcactgtacgaaaaaaagaggagtataaaatggcactgtacaatctctatccaggtgtttttgagacagtggaaatgttaccatccaaagctggaatttggcgggtggaatgccttattggcgagcatctacatgctgggatgagcacactttttctggtgtacagcaataagtgtcagactcccctgggaatggcttctggacacattagagattttcagattacagcttcaggacaatatggacagtgggccccaaagctggccagacttcattattccggatcaatcaatgcctggagcaccaaggagcccttttcttggatcaaggtggatctgttggcaccaatgattattcacggcatcaagacccagggtgcccgtcagaagttctccagcctctacatctctcagtttatcatcatgtatagtcttgatgggaagaagtggcagacttatcgaggaaattccactggaaccttaatggtcttctttggcaatgtggattcatctgggataaaacacaatatttttaaccctccaattattgctcgatacatccgtttgcacccaactcattatagcattcgcagcactcttcgcatggagttgatgggctgtgatttaaatagttgcagcatgccattgggaatggagagtaaagcaatatcagatgcacagattactgcttcatcctactttaccaatatgtttgccacctggtctccttcaaaagctcgacttcacctccaagggaggagtaatgcctggagacctcaggtgaataatccaaaagagtggctgcaagtggacttccagaagacaatgaaagtcacaggagtaactactcagggagtaaaatctctgcttaccagcatgtatgtgaaggagttcctcatctccagcagtcaagatggccatcagtggactctcttttttcagaatggcaaagtaaaggtttttcagggaaatcaagactccttcacacctgtggtgaactctctagacccaccgttactgactcgctaccttcgaattcacccccagagttgggtgcaccagattgccctgaggatggaggttctgggctgcgaggcacaggacctctacggcgcgccaggtacctcagagtctgctacccccgagtcagggccaggatcagagccagccacctccgggtctgagacacccgggacttccgagagtgccacccctgagtccggacccgggtccgagcccgccacttccggctccgaaactcccggcacaagcgagagcgctaccccagagtcaggaccaggaacatctacagagccctctgaaggctccgctccagggtccccagccggcagtcccactagcaccgaggagggaacctctgaaagcgccacacccgaatcagggccagggtctgagcctgctaccagcggcagcgagacaccaggcacctctgagtccgccacaccagagtccggacccggatctcccgctgggagccccacctccactgaggagggatctcctgctggctctccaacatctactgaggaaggtacctcaaccgagccatccgagggatcagctcccggcacctcagagtcggcaaccccggagtctggacccggaacttccgaaagtgccacaccagagtccggtcccgggacttcagaatcagcaacacccgagtccggccctgggtctgaacccgccacaagtggtagtgagacaccaggatcagaacctgctacctcagggtcagagacacccggatctccggcaggctcaccaacctccactgaggagggcaccagcacagaaccaagcgagggctccgcacccggaacaagcactgaacccagtgagggttcagcacccggctctgagccggccacaagtggcagtgagacacccggcacttcagagagtgccacccccgagagtggcccaggcactagtaccgagccctctgaaggcagtgcgccagcctcgagcgaacaaaaactcatctcagaagaggatctgtcacctgcaaccggtcatcatcaccatcaccattga

SEQ ID NO: 1205 - protein, 2203 aa, synthetic construct
  REGION 1..2203: note = Description of Artificial Sequence: Synthetic polypeptide
ATRRYYLGAVELSWDYMQSDLGELPVGAPGSSPSASTGTGPGSSPSASTGTGPGASPGTSSTGSPGASPGTSSTGSPGSSTPSGATGSPGSSPSASTGTGPGASPGTSSTGSPGSSPSASTGTGPGTPGSGTASSSPGSSTPSGATGSPGSSTPSGATGSPGASPGTSSTGSPASSDARFPPRVPKSFPFNTSVVYKKTLFVEFTDHLFNIAKPRPPWMGLLGPTIQAEVYDTVVITLKNMASHPVSLHAVGVSYWKASEGAEYDDQTSQREKEDDKVFPGGSHTYVWQVLKENGPMASDPLCLTYSYLSHVDLVKDLNSGLIGALLVCREGSLAKEKTQTLHKFILLFAVFDEGKSWHSETKNSLMQDRDAASARAWPKMHTVNGYVNRSLPGLIGCHRKSVYWHVIGMGTTPEVHSIFLEGHTFLVRNHRQASLEISPITFLTAQTLLMDLGQFLLFCHISSHQHDGMEAYVKVDSCPEEPQLRMKNNEEAEDYDDDLTDSEMDVVRFDDDNSPSFIQIRSVAKKHPKTWVHYIAAEEEDWDYAPLVLAPDGAPTSTEPSEGSAPGSPAGSPTSTEEGTSTEPSEGSAPGTSTEPSEGSAPGTSESATPESGPGTSTEPSEGSAPGTSESATPESGPGSEPATSGSETPGTSTEPSEGSAPGTSTEPSEGSAPGTSESATPESGPGTSESATPESGPGASSDRSYKSQYLNNGPQRIGRKYKKVRFMAYTDETFKTREAIQHESGILGPLLYGEVGDTLLIIFKNQASRPYNIYPHGITDVRPLYSRRLPKGVKHLKDFPILPGEIFKYKWTVTVEDGPTKSDPRCLTRYYSSFVNMERDLASGLIGPLLICYKESVDQRGNQIMSDKRNVILFSVFDENRSWYLTENIQRFLPNPAGVQLEDPEFQASNIMHSINGYVFDSLQLSVCLHEVAYWYILSIGAQTDFLSVFFSGYTFKHKMVYEDTLTLFPFSGETVFMSMENPGLWILGCHNSDFRNRGMTALLKVSSCDKNTGDYYEDSYEDISAYLLSKNNAIEPRSFSQNGAPSPAGSPTSTEEGTSESATPESGPGSEPATSGSETPGTSESATPESGPGTSTEPSEGSAPGTSTEPSEGSAPGTSTEPSEGSAPGTSTEPSEGSAPGTSTEPSEGSAPGTSTEPSEGSAPGSPAGSPTSTEEGTSTEPSEGSAPGASSPPVLKRHQAEITRTTLQSDQEEIDYDDTISVEMKKEDFDIYDEDENQSPRSFQKKTRHYFIAAVERLWDYGMSSSPHVLRNRAQSGSVPQFKKVVFQEFTDGSFTQPLYRGELNEHLGLLGPYIRAEVEDNIMVTFRNQASRPYSFYSSLISYEEDQRQGAEPRKNFVKPNETKTYFWKVQHHMAPTKDEFDCKAWAYFSDVDLEKDVHSGLIGPLLVCHTNTLNPAHGRQVTVQEFALFFTIFDETKSWYFTENMERNCRAPCNIQMEDPTFKENYRFHAINGYIMDTLPGLVMAQDQRIRWYLLSMGSNENIHSIHFSGHVFTVRKKEEYKMALYNLYPGVFETVEMLPSKAGIWRVECLIGEHLHAGMSTLFLVYSNKCQTPLGMASGHIRDFQITASGQYGQWAPKLARLHYSGSINAWSTKEPFSWIKVDLLAPMIIHGIKTQGARQKFSSLYISQFIIMYSLDGKKWQTYRGNSTGTLMVFFGNVDSSGIKHNIFNPPIIARYIRLHPTHYSIRSTLRMELMGCDLNSCSMPLGMESKAISDAQITASSYFTNMFATWSPSKARLHLQGRSNAWRPQVNNPKEWLQVDFQKTMKVTGVTTQGVKSLLTSMYVKEFLISSSQDGHQWTLFFQNGKVKVFQGNQDSFTPVVNSLDPPLLTRYLRIHPQSWVHQIALRMEVLGCEAQDLYGAPGTSESATPESGPGSEPATSGSETPGTSESATPESGPGSEPATSGSETPGTSESATPESGPGTSTEPSEGSAPGSPAGSPTSTEEGTSESATPESGPGSEPATSGSETPGTSESATPESGPGSPAGSPTSTEEGSPAGSPTSTEEGTSTEPSEGSAPGTSESATPESGPGTSESATPESGPGTSESATPESGPGSEPATSGSETPGSEPATSGSETPGSPAGSPTSTEEGTSTEPSEGSAPGTSTEPSEGSAPGSEPATSGSETPGTSESATPESGPGTSTEPSEGSAPASSEQKLISEEDLSPATGHHHHHH

SEQ ID NO: 1206 - DNA, 6612 bp, synthetic construct
  misc_feature 1..6612: note = Description of Artificial Sequence: Synthetic polynucleotide
  source 1..6612: mol_type = other DNA
gccaccagaagatactacctgggtgcagtggaactgtcatgggactatatgcaaagtgatctcggtgagctgcctgtgggcgcgccaggctccagcccctccgcgagcacgggaaccggaccaggttcgtcaccctcagcatcaacggggacgggaccgggggcgtcaccaggaacgtcctccaccggctcgccgggtgcatcacccggaacgtcatcgaccggatcgccagggagctcgacgccatcaggcgcaacaggatcacctggctcaagccctagcgcgtcaaccggcacgggtccgggtgcctcccctggcacgtccagcaccggatcacccggatcgagcccatccgcctcaaccggaaccggacccggtacaccagggtcgggaacagcctcctcgtcaccaggctcctcaaccccctcgggagccacgggttcgcccggttcgtcaacgccttccggagcaactggtagccccggagcatcgccaggaacttcgagcacggggtcgcccgcctcgagcgacgcaagatttcctcctagagtgccaaaatcttttccattcaacacctcagtcgtgtacaaaaagactctgtttgtagaattcacggatcaccttttcaacatcgctaagccaaggccaccctggatgggtctgctaggtcctaccatccaggctgaggtttatgatacagtggtcattacacttaagaacatggcttcccatcctgtcagtcttcatgctgttggtgtatcctactggaaagcttctgagggagctgaatatgatgatcagaccagtcaaagggagaaagaagatgataaagtcttccctggtggaagccatacatatgtctggcaggtcctgaaagagaatggtccaatggcctctgacccactgtgccttacctactcatatctttctcatgtggacctggtaaaagacttgaattcaggcctcattggagccctactagtatgtagagaagggagtctggccaaggaaaagacacagaccttgcacaaatttatactactttttgctgtatttgatgaagggaaaagttggcactcagaaacaaagaactccttgatgcaggatagggatgctgcatctgctcgggcctggcctaaaatgcacacagtcaatggttatgtaaacaggtctctgccaggtctgattggatgccacaggaaatcagtctattggcatgtgattggaatgggcaccactcctgaagtgcactcaatattcctcgaaggtcacacatttcttgtgaggaaccatcgccaggctagcttggaaatctcgccaataactttccttactgctcaaacactcttgatggaccttggacagtttctactgttttgtcatatctcttcccaccaacatgatggcatggaagcttatgtcaaagtagacagctgtccagaggaaccccaactacgaatgaaaaataatgaagaagcggaagactatgatgatgatcttactgattctgaaatggatgtggtcaggtttgatgatgacaactctccttcctttatccaaattcgctcagttgccaagaagcatcctaaaacttgggtacattacattgctgctgaagaggaggactgggactatgctcccttagtcctcgcccccgatggcgcgccaaccagtacggagccgtccgaggggagcgcaccaggaagcccggctgggagcccgacttctaccgaagagggtacatctaccgaaccaagtgaaggttcagcaccaggcacctcaacagaaccctctgagggctcggcgcctggtacaagtgagtccgccaccccagaatccgggcctgggacaagcacagaaccttcggaagggagtgcccctggaacatccgaatcggcaaccccagaatcagggccaggatctgagcccgcgacttcgggctccgagacgcctgggacatccaccgagccctccgaaggatcagccccaggcaccagcacggagccctctgagggaagcgcacctggtaccagcgaaagcgcaactcccgaatcaggtcccggtacgagcgagtcggcgaccccggagagcgggccaggtgcctcgagcgacagaagttataaaagtcaatatttgaacaatggccctcagcggattggtaggaagtacaaaaaagtccgatttatggcatacacagatgaaacctttaagactcgtgaagctattcagcatgaatcaggaatcttgggacctttactttatggggaagttggagacacactgttgattatatttaagaatcaagcaagcagaccatataacatctaccctcacggaatcactgatgtccgtcctttgtattcaaggagattaccaaaaggtgtaaaacatttgaaggattttccaattctgccaggagaaatattcaaatataaatggacagtgactgtagaagatgggccaactaaatcagatcctcggtgcctgacccgctattactctagtttcgttaatatggagagagatctagcttcaggactcattggccctctcctcatctgctacaaagaatctgtagatcaaagaggaaaccagataatgtcagacaagaggaatgtcatcctgttttctgtatttgatgagaaccgaagctggtacctcacagagaatatacaacgctttctccccaatccagctggagtgcagcttgaggatccagagttccaagcctccaacatcatgcacagcatcaatggctatgtttttgatagtttgcagttgtcagtttgtttgcatgaggtggcatactggtacattctaagcattggagcacagactgacttcctttctgtcttcttctctggatataccttcaaacacaaaatggtctatgaagacacactcaccctattcccattctcaggagaaactgtcttcatgtcgatggaaaacccaggtctatggattctggggtgccacaactcagactttcggaacagaggcatgaccgccttactgaaggtttctagttgtgacaagaacactggtgattattacgaggacagttatgaagatatttcagcatacttgctgagtaaaaacaatgccattgaaccaagaagcttctctcaaaacggcgcgccaagtcccgctggaagcccaactagcaccgaagaggggacctcagagtccgccacccccgagtccggccctggctctgagcctgccactagcggctccgagactcctggcacatccgaaagcgctacacccgagagtggacccggcacctctaccgagcccagtgagggctccgcccctggaacaagcaccgagcccagcgaaggcagcgccccagggacctccacagagcccagtgaaggcagtgctcctggcaccagcaccgaaccaagcgagggctctgcacccgggacctccaccgagccaagcgaaggctctgcccctggcacttccaccgagcccagcgaaggcagcgcccctgggagccccgctggctctcccaccagcactgaggagggcacatctaccgaaccaagtgaaggctctgcaccaggtgcctcgagcccaccagtcttgaaacgccatcaagctgaaataactcgtactactcttcagtcagatcaagaggaaatcgattatgatgataccatatcagttgaaatgaagaaggaagattttgacatttatgatgaggatgaaaatcagagcccccgcagctttcaaaagaaaacacgacactattttattgctgcagtggagaggctctgggattatgggatgagtagctccccacatgttctaagaaacagggctcagagtggcagtgtccctcagttcaagaaagttgttttccaggaatttactgatggctcctttactcagcccttataccgtggagaactaaatgaacatttgggactcctggggccatatataagagcagaagttgaagataatatcatggtaactttcagaaatcaggcctctcgtccctattccttctattctagccttatttcttatgaggaagatcagaggcaaggagcagaacctagaaaaaactttgtcaagcctaatgaaaccaaaacttacttttggaaagtgcaacatcatatggcacccactaaagatgagtttgactgcaaagcctgggcttatttctctgatgttgacctggaaaaagatgtgcactcaggcctgattggaccccttctggtctgccacactaacacactgaaccctgctcatgggagacaagtgacagtacaggaatttgctctgtttttcaccatctttgatgagaccaaaagctggtacttcactgaaaatatggaaagaaactgcagggctccctgcaatatccagatggaagatcccacttttaaagagaattatcgcttccatgcaatcaatggctacataatggatacactacctggcttagtaatggctcaggatcaaaggattcgatggtatctgctcagcatgggcagcaatgaaaacatccattctattcatttcagtggacatgtgttcactgtacgaaaaaaagaggagtataaaatggcactgtacaatctctatccaggtgtttttgagacagtggaaatgttaccatccaaagctggaatttggcgggtggaatgccttattggcgagcatctacatgctgggatgagcacactttttctggtgtacagcaataagtgtcagactcccctgggaatggcttctggacacattagagattttcagattacagcttcaggacaatatggacagtgggccccaaagctggccagacttcattattccggatcaatcaatgcctggagcaccaaggagcccttttcttggatcaaggtggatctgttggcaccaatgattattcacggcatcaagacccagggtgcccgtcagaagttctccagcctctacatctctcagtttatcatcatgtatagtcttgatgggaagaagtggcagacttatcgaggaaattccactggaaccttaatggtcttctttggcaatgtggattcatctgggataaaacacaatatttttaaccctccaattattgctcgatacatccgtttgcacccaactcattatagcattcgcagcactcttcgcatggagttgatgggctgtgatttaaatagttgcagcatgccattgggaatggagagtaaagcaatatcagatgcacagattactgcttcatcctactttaccaatatgtttgccacctggtctccttcaaaagctcgacttcacctccaagggaggagtaatgcctggagacctcaggtgaataatccaaaagagtggctgcaagtggacttccagaagacaatgaaagtcacaggagtaactactcagggagtaaaatctctgcttaccagcatgtatgtgaaggagttcctcatctccagcagtcaagatggccatcagtggactctcttttttcagaatggcaaagtaaaggtttttcagggaaatcaagactccttcacacctgtggtgaactctctagacccaccgttactgactcgctaccttcgaattcacccccagagttgggtgcaccagattgccctgaggatggaggttctgggctgcgaggcacaggacctctacggcgcgccaggtacctcagagtctgctacccccgagtcagggccaggatcagagccagccacctccgggtctgagacacccgggacttccgagagtgccacccctgagtccggacccgggtccgagcccgccacttccggctccgaaactcccggcacaagcgagagcgctaccccagagtcaggaccaggaacatctacagagccctctgaaggctccgctccagggtccccagccggcagtcccactagcaccgaggagggaacctctgaaagcgccacacccgaatcagggccagggtctgagcctgctaccagcggcagcgagacaccaggcacctctgagtccgccacaccagagtccggacccggatctcccgctgggagccccacctccactgaggagggatctcctgctggctctccaacatctactgaggaaggtacctcaaccgagccatccgagggatcagctcccggcacctcagagtcggcaaccccggagtctggacccggaacttccgaaagtgccacaccagagtccggtcccgggacttcagaatcagcaacacccgagtccggccctgggtctgaacccgccacaagtggtagtgagacaccaggatcagaacctgctacctcagggtcagagacacccggatctccggcaggctcaccaacctccactgaggagggcaccagcacagaaccaagcgagggctccgcacccggaacaagcactgaacccagtgagggttcagcacccggctctgagccggccacaagtggcagtgagacacccggcacttcagagagtgccacccccgagagtggcccaggcactagtaccgagccctctgaaggcagtgcgccagcctcgagcgaacaaaaactcatctcagaagaggatctgtcacctgcaaccggtcatcatcaccatcaccattga

SEQ ID NO: 1207 - protein, 2203 aa, synthetic construct
  REGION 1..2203: note = Description of Artificial Sequence: Synthetic polypeptide
ATRRYYLGAVELSWDYMQGAPGSSPSASTGTGPGSSPSASTGTGPGASPGTSSTGSPGASPGTSSTGSPGSSTPSGATGSPGSSPSASTGTGPGASPGTSSTGSPGSSPSASTGTGPGTPGSGTASSSPGSSTPSGATGSPGSSTPSGATGSPGASPGTSSTGSPASSSDLGELPVDARFPPRVPKSFPFNTSVVYKKTLFVEFTDHLFNIAKPRPPWMGLLGPTIQAEVYDTVVITLKNMASHPVSLHAVGVSYWKASEGAEYDDQTSQREKEDDKVFPGGSHTYVWQVLKENGPMASDPLCLTYSYLSHVDLVKDLNSGLIGALLVCREGSLAKEKTQTLHKFILLFAVFDEGKSWHSETKNSLMQDRDAASARAWPKMHTVNGYVNRSLPGLIGCHRKSVYWHVIGMGTTPEVHSIFLEGHTFLVRNHRQASLEISPITFLTAQTLLMDLGQFLLFCHISSHQHDGMEAYVKVDSCPEEPQLRMKNNEEAEDYDDDLTDSEMDVVRFDDDNSPSFIQIRSVAKKHPKTWVHYIAAEEEDWDYAPLVLAPDGAPTSTEPSEGSAPGSPAGSPTSTEEGTSTEPSEGSAPGTSTEPSEGSAPGTSESATPESGPGTSTEPSEGSAPGTSESATPESGPGSEPATSGSETPGTSTEPSEGSAPGTSTEPSEGSAPGTSESATPESGPGTSESATPESGPGASSDRSYKSQYLNNGPQRIGRKYKKVRFMAYTDETFKTREAIQHESGILGPLLYGEVGDTLLIIFKNQASRPYNIYPHGITDVRPLYSRRLPKGVKHLKDFPILPGEIFKYKWTVTVEDGPTKSDPRCLTRYYSSFVNMERDLASGLIGPLLICYKESVDQRGNQIMSDKRNVILFSVFDENRSWYLTENIQRFLPNPAGVQLEDPEFQASNIMHSINGYVFDSLQLSVCLHEVAYWYILSIGAQTDFLSVFFSGYTFKHKMVYEDTLTLFPFSGETVFMSMENPGLWILGCHNSDFRNRGMTALLKVSSCDKNTGDYYEDSYEDISAYLLSKNNAIEPRSFSQNGAPSPAGSPTSTEEGTSESATPESGPGSEPATSGSETPGTSESATPESGPGTSTEPSEGSAPGTSTEPSEGSAPGTSTEPSEGSAPGTSTEPSEGSAPGTSTEPSEGSAPGTSTEPSEGSAPGSPAGSPTSTEEGTSTEPSEGSAPGASSPPVLKRHQAEITRTTLQSDQEEIDYDDTISVEMKKEDFDIYDEDENQSPRSFQKKTRHYFIAAVERLWDYGMSSSPHVLRNRAQSGSVPQFKKVVFQEFTDGSFTQPLYRGELNEHLGLLGPYIRAEVEDNIMVTFRNQASRPYSFYSSLISYEEDQRQGAEPRKNFVKPNETKTYFWKVQHHMAPTKDEFDCKAWAYFSDVDLEKDVHSGLIGPLLVCHTNTLNPAHGRQVTVQEFALFFTIFDETKSWYFTENMERNCRAPCNIQMEDPTFKENYRFHAINGYIMDTLPGLVMAQDQRIRWYLLSMGSNENIHSIHFSGHVFTVRKKEEYKMALYNLYPGVFETVEMLPSKAGIWRVECLIGEHLHAGMSTLFLVYSNKCQTPLGMASGHIRDFQITASGQYGQWAPKLARLHYSGSINAWSTKEPFSWIKVDLLAPMIIHGIKTQGARQKFSSLYISQFIIMYSLDGKKWQTYRGNSTGTLMVFFGNVDSSGIKHNIFNPPIIARYIRLHPTHYSIRSTLRMELMGCDLNSCSMPLGMESKAISDAQITASSYFTNMFATWSPSKARLHLQGRSNAWRPQVNNPKEWLQVDFQKTMKVTGVTTQGVKSLLTSMYVKEFLISSSQDGHQWTLFFQNGKVKVFQGNQDSFTPVVNSLDPPLLTRYLRIHPQSWVHQIALRMEVLGCEAQDLYGAPGTSESATPESGPGSEPATSGSETPGTSESATPESGPGSEPATSGSETPGTSESATPESGPGTSTEPSEGSAPGSPAGSPTSTEEGTSESATPESGPGSEPATSGSETPGTSESATPESGPGSPAGSPTSTEEGSPAGSPTSTEEGTSTEPSEGSAPGTSESATPESGPGTSESATPESGPGTSESATPESGPGSEPATSGSETPGSEPATSGSETPGSPAGSPTSTEEGTSTEPSEGSAPGTSTEPSEGSAPGSEPATSGSETPGTSESATPESGPGTSTEPSEGSAPASSEQKLISEEDLSPATGHHHHHH

SEQ ID NO: 1208 - DNA, 6612 bp, synthetic construct
  misc_feature 1..6612: note = Description of Artificial Sequence: Synthetic polynucleotide
  source 1..6612: mol_type = other DNA
gccaccagaagatactacctgggtgcagtggaactgtcatgggactatatgcaaggcgcgccaggctccagcccctccgcgagcacgggaaccggaccaggttcgtcaccctcagcatcaacggggacgggaccgggggcgtcaccaggaacgtcctccaccggctcgccgggtgcatcacccggaacgtcatcgaccggatcgccagggagctcgacgccatcaggcgcaacaggatcacctggctcaagccctagcgcgtcaaccggcacgggtccgggtgcctcccctggcacgtccagcaccggatcacccggatcgagcccatccgcctcaaccggaaccggacccggtacaccagggtcgggaacagcctcctcgtcaccaggctcctcaaccccctcgggagccacgggttcgcccggttcgtcaacgccttccggagcaactggtagccccggagcatcgccaggaacttcgagcacggggtcgcccgcctcgagcagtgatctcggtgagctgcctgtggacgcaagatttcctcctagagtgccaaaatcttttccattcaacacctcagtcgtgtacaaaaagactctgtttgtagaattcacggatcaccttttcaacatcgctaagccaaggccaccctggatgggtctgctaggtcctaccatccaggctgaggtttatgatacagtggtcattacacttaagaacatggcttcccatcctgtcagtcttcatgctgttggtgtatcctactggaaagcttctgagggagctgaatatgatgatcagaccagtcaaagggagaaagaagatgataaagtcttccctggtggaagccatacatatgtctggcaggtcctgaaagagaatggtccaatggcctctgacccactgtgccttacctactcatatctttctcatgtggacctggtaaaagacttgaattcaggcctcattggagccctactagtatgtagagaagggagtctggccaaggaaaagacacagaccttgcacaaatttatactactttttgctgtatttgatgaagggaaaagttggcactcagaaacaaagaactccttgatgcaggatagggatgctgcatctgctcgggcctggcctaaaatgcacacagtcaatggttatgtaaacaggtctctgccaggtctgattggatgccacaggaaatcagtctattggcatgtgattggaatgggcaccactcctgaagtgcactcaatattcctcgaaggtcacacatttcttgtgaggaaccatcgccaggctagcttggaaatctcgccaataactttccttactgctcaaacactcttgatggaccttggacagtttctactgttttgtcatatctcttcccaccaacatgatggcatggaagcttatgtcaaagtagacagctgtccagaggaaccccaactacgaatgaaaaataatgaagaagcggaagactatgatgatgatcttactgattctgaaatggatgtggtcaggtttgatgatgacaactctccttcctttatccaaattcgctcagttgccaagaagcatcctaaaacttgggtacattacattgctgctgaagaggaggactgggactatgctcccttagtcctcgcccccgatggcgcgccaaccagtacggagccgtccgaggggagcgcaccaggaagcccggctgggagcccgacttctaccgaagagggtacatctaccgaaccaagtgaaggttcagcaccaggcacctcaacagaaccctctgagggctcggcgcctggtacaagtgagtccgccaccccagaatccgggcctgggacaagcacagaaccttcggaagggagtgcccctggaacatccgaatcggcaaccccagaatcagggccaggatctgagcccgcgacttcgggctccgagacgcctgggacatccaccgagccctccgaaggatcagccccaggcaccagcacggagccctctgagggaagcgcacctggtaccagcgaaagcgcaactcccgaatcaggtcccggtacgagcgagtcggcgaccccggagagcgggccaggtgcctcgagcgacagaagttataaaagtcaatatttgaacaatggccctcagcggattggtaggaagtacaaaaaagtccgatttatggcatacacagatgaaacctttaagactcgtgaagctattcagcatgaatcaggaatcttgggacctttactttatggggaagttggagacacactgttgattatatttaagaatcaagcaagcagaccatataacatctaccctcacggaatcactgatgtccgtcctttgtattcaaggagattaccaaaaggtgtaaaacatttgaaggattttccaattctgccaggagaaatattcaaatataaatggacagtgactgtagaagatgggccaactaaatcagatcctcggtgcctgacccgctattactctagtttcgttaatatggagagagatctagcttcaggactcattggccctctcctcatctgctacaaagaatctgtagatcaaagaggaaaccagataatgtcagacaagaggaatgtcatcctgttttctgtatttgatgagaaccgaagctggtacctcacagagaatatacaacgctttctccccaatccagctggagtgcagcttgaggatccagagttccaagcctccaacatcatgcacagcatcaatggctatgtttttgatagtttgcagttgtcagtttgtttgcatgaggtggcatactggtacattctaagcattggagcacagactgacttcctttctgtcttcttctctggatataccttcaaacacaaaatggtctatgaagacacactcaccctattcccattctcaggagaaactgtcttcatgtcgatggaaaacccaggtctatggattctggggtgccacaactcagactttcggaacagaggcatgaccgccttactgaaggtttctagttgtgacaagaacactggtgattattacgaggacagttatgaagatatttcagcatacttgctgagtaaaaacaatgccattgaaccaagaagcttctctcaaaacggcgcgccaagtcccgctggaagcccaactagcaccgaagaggggacctcagagtccgccacccccgagtccggccctggctctgagcctgccactagcggctccgagactcctggcacatccgaaagcgctacacccgagagtggacccggcacctctaccgagcccagtgagggctccgcccctggaacaagcaccgagcccagcgaaggcagcgccccagggacctccacagagcccagtgaaggcagtgctcctggcaccagcaccgaaccaagcgagggctctgcacccgggacctccaccgagccaagcgaaggctctgcccctggcacttccaccgagcccagcgaaggcagcgcccctgggagccccgctggctctcccaccagcactgaggagggcacatctaccgaaccaagtgaaggctctgcaccaggtgcctcgagcccaccagtcttgaaacgccatcaagctgaaataactcgtactactcttcagtcagatcaagaggaaatcgattatgatgataccatatcagttgaaatgaagaaggaagattttgacatttatgatgaggatgaaaatcagagcccccgcagctttcaaaagaaaacacgacactattttattgctgcagtggagaggctctgggattatgggatgagtagctccccacatgttctaagaaacagggctcagagtggcagtgtccctcagttcaagaaagttgttttccaggaatttactgatggctcctttactcagcccttataccgtggagaactaaatgaacatttgggactcctggggccatatataagagcagaagttgaagataatatcatggtaactttcagaaatcaggcctctcgtccctattccttctattctagccttatttcttatgaggaagatcagaggcaaggagcagaacctagaaaaaactttgtcaagcctaatgaaaccaaaacttacttttggaaagtgcaacatcatatggcacccactaaagatgagtttgactgcaaagcctgggcttatttctctgatgttgacctggaaaaagatgtgcactcaggcctgattggaccccttctggtctgccacactaacacactgaaccctgctcatgggagacaagtgacagtacaggaatttgctctgtttttcaccatctttgatgagaccaaaagctggtacttcactgaaaatatggaaagaaactgcagggctccctgcaatatccagatggaagatcccacttttaaagagaattatcgcttccatgcaatcaatggctacataatggatacactacctggcttagtaatggctcaggatcaaaggattcgatggtatctgctcagcatgggcagcaatgaaaacatccattctattcatttcagtggacatgtgttcactgtacgaaaaaaagaggagtataaaatggcactgtacaatctctatccaggtgtttttgagacagtggaaatgttaccatccaaagctggaatttggcgggtggaatgccttattggcgagcatctacatgctgggatgagcacactttttctggtgtacagcaataagtgtcagactcccctgggaatggcttctggacacattagagattttcagattacagcttcaggacaatatggacagtgggccccaaagctggccagacttcattattccggatcaatcaatgcctggagcaccaaggagcccttttcttggatcaaggtggatctgttggcaccaatgattattcacggcatcaagacccagggtgcccgtcagaagttctccagcctctacatctctcagtttatcatcatgtatagtcttgatgggaagaagtggcagacttatcgaggaaattccactggaaccttaatggtcttctttggcaatgtggattcatctgggataaaacacaatatttttaaccctccaattattgctcgatacatccgtttgcacccaactcattatagcattcgcagcactcttcgcatggagttgatgggctgtgatttaaatagttgcagcatgccattgggaatggagagtaaagcaatatcagatgcacagattactgcttcatcctactttaccaatatgtttgccacctggtctccttcaaaagctcgacttcacctccaagggaggagtaatgcctggagacctcaggtgaataatccaaaagagtggctgcaagtggacttccagaagacaatgaaagtcacaggagtaactactcagggagtaaaatctctgcttaccagcatgtatgtgaaggagttcctcatctccagcagtcaagatggccatcagtggactctcttttttcagaatggcaaagtaaaggtttttcagggaaatcaagactccttcacacctgtggtgaactctctagacccaccgttactgactcgctaccttcgaattcacccccagagttgggtgcaccagattgccctgaggatggaggttctgggctgcgaggcacaggacctctacggcgcgccaggtacctcagagtctgctacccccgagtcagggccaggatcagagccagccacctccgggtctgagacacccgggacttccgagagtgccacccctgagtccggacccgggtccgagcccgccacttccggctccgaaactcccggcacaagcgagagcgctaccccagagtcaggaccaggaacatctacagagccctctgaaggctccgctccagggtccccagccggcagtcccactagcaccgaggagggaacctctgaaagcgccacacccgaatcagggccagggtctgagcctgctaccagcggcagcgagacaccaggcacctctgagtccgccacaccagagtccggacccggatctcccgctgggagccccacctccactgaggagggatctcctgctggctctccaacatctactgaggaaggtacctcaaccgagccatccgagggatcagctcccggcacctcagagtcggcaaccccggagtctggacccggaacttccgaaagtgccacaccagagtccggtcccgggacttcagaatcagcaacacccgagtccggccctgggtctgaacccgccacaagtggtagtgagacaccaggatcagaacctgctacctcagggtcagagacacccggatctccggcaggctcaccaacctccactgaggagggcaccagcacagaaccaagcgagggctccgcacccggaacaagcactgaacccagtgagggttcagcacccggctctgagccggccacaagtggcagtgagacacccggcacttcagagagtgccacccccgagagtggcccaggcactagtaccgagccctctgaaggcagtgcgccagcctcgagcgaacaaaaactcatctcagaagaggatctgtcacctgcaaccggtcatcatcaccatcaccattga

SEQ ID NO: 1209 - protein, 2203 aa, synthetic construct
  REGION 1..2203: note = Description of Artificial Sequence: Synthetic polypeptide
ATRRYYLGAVELSWDYMQGAPTSESATPESGPGSEPATSGSETPGTSESATPESGPGSEPATSGSETPGTSESATPESGPGTSTEPSEGSAPGSPAGSPTSTEEGTSESATPESGPGSEPATSGSETPGTSESATPESGPGSPAGSPTSTEEGSPAGSPTSTEEGASSSDLGELPVDARFPPRVPKSFPFNTSVVYKKTLFVEFTDHLFNIAKPRPPWMGLLGPTIQAEVYDTVVITLKNMASHPVSLHAVGVSYWKASEGAEYDDQTSQREKEDDKVFPGGSHTYVWQVLKENGPMASDPLCLTYSYLSHVDLVKDLNSGLIGALLVCREGSLAKEKTQTLHKFILLFAVFDEGKSWHSETKNSLMQDRDAASARAWPKMHTVNGYVNRSLPGLIGCHRKSVYWHVIGMGTTPEVHSIFLEGHTFLVRNHRQASLEISPITFLTAQTLLMDLGQFLLFCHISSHQHDGMEAYVKVDSCPEEPQLRMKNNEEAEDYDDDLTDSEMDVVRFDDDNSPSFIQIRSVAKKHPKTWVHYIAAEEEDWDYAPLVLAPDGAPTSTEPSEGSAPGSPAGSPTSTEEGTSTEPSEGSAPGTSTEPSEGSAPGTSESATPESGPGTSTEPSEGSAPGTSESATPESGPGSEPATSGSETPGTSTEPSEGSAPGTSTEPSEGSAPGTSESATPESGPGTSESATPESGPGASSDRSYKSQYLNNGPQRIGRKYKKVRFMAYTDETFKTREAIQHESGILGPLLYGEVGDTLLIIFKNQASRPYNIYPHGITDVRPLYSRRLPKGVKHLKDFPILPGEIFKYKWTVTVEDGPTKSDPRCLTRYYSSFVNMERDLASGLIGPLLICYKESVDQRGNQIMSDKRNVILFSVFDENRSWYLTENIQRFLPNPAGVQLEDPEFQASNIMHSINGYVFDSLQLSVCLHEVAYWYILSIGAQTDFLSVFFSGYTFKHKMVYEDTLTLFPFSGETVFMSMENPGLWILGCHNSDFRNRGMTALLKVSSCDKNTGDYYEDSYEDISAYLLSKNNAIEPRSFSQNGAPSPAGSPTSTEEGTSESATPESGPGSEPATSGSETPGTSESATPESGPGTSTEPSEGSAPGTSTEPSEGSAPGTSTEPSEGSAPGTSTEPSEGSAPGTSTEPSEGSAPGTSTEPSEGSAPGSPAGSPTSTEEGTSTEPSEGSAPGASSPPVLKRHQAEITRTTLQSDQEEIDYDDTISVEMKKEDFDIYDEDENQSPRSFQKKTRHYFIAAVERLWDYGMSSSPHVLRNRAQSGSVPQFKKVVFQEFTDGSFTQPLYRGELNEHLGLLGPYIRAEVEDNIMVTFRNQASRPYSFYSSLISYEEDQRQGAEPRKNFVKPNETKTYFWKVQHHMAPTKDEFDCKAWAYFSDVDLEKDVHSGLIGPLLVCHTNTLNPAHGRQVTVQEFALFFTIFDETKSWYFTENMERNCRAPCNIQMEDPTFKENYRFHAINGYIMDTLPGLVMAQDQRIRWYLLSMGSNENIHSIHFSGHVFTVRKKEEYKMALYNLYPGVFETVEMLPSKAGIWRVECLIGEHLHAGMSTLFLVYSNKCQTPLGMASGHIRDFQITASGQYGQWAPKLARLHYSGSINAWSTKEPFSWIKVDLLAPMIIHGIKTQGARQKFSSLYISQFIIMYSLDGKKWQTYRGNSTGTLMVFFGNVDSSGIKHNIFNPPIIARYIRLHPTHYSIRSTLRMELMGCDLNSCSMPLGMESKAISDAQITASSYFTNMFATWSPSKARLHLQGRSNAWRPQVNNPKEWLQVDFQKTMKVTGVTTQGVKSLLTSMYVKEFLISSSQDGHQWTLFFQNGKVKVFQGNQDSFTPVVNSLDPPLLTRYLRIHPQSWVHQIALRMEVLGCEAQDLYGAPGTSESATPESGPGSEPATSGSETPGTSESATPESGPGSEPATSGSETPGTSESATPESGPGTSTEPSEGSAPGSPAGSPTSTEEGTSESATPESGPGSEPATSGSETPGTSESATPESGPGSPAGSPTSTEEGSPAGSPTSTEEGTSTEPSEGSAPGTSESATPESGPGTSESATPESGPGTSESATPESGPGSEPATSGSETPGSEPATSGSETPGSPAGSPTSTEEGTSTEPSEGSAPGTSTEPSEGSAPGSEPATSGSETPGTSESATPESGPGTSTEPSEGSAPASSEQKLISEEDLSPATGHHHHHH

SEQ ID NO: 1210 - DNA, 6612 bp, synthetic construct
  misc_feature 1..6612: note = Description of Artificial Sequence: Synthetic polynucleotide
  source 1..6612: mol_type = other DNA
gccaccagaagatactacctgggtgcagtggaactgtcatgggactatatgcaaggcgcgccaacatcagagagcgccacccctgaaagtggtcccgggagcgagccagccacatctgggtcggaaacgccaggcacaagtgagtctgcaactcccgagtccggacctggctccgagcctgccactagcggctccgagactccgggaacttccgagagcgctacaccagaaagcggacccggaaccagtaccgaacctagcgagggctctgctccgggcagcccagccggctctcctacatccacggaggagggcacttccgaatccgccaccccggagtcagggccaggatctgaacccgctacctcaggcagtgagacgccaggaacgagcgagtccgctacaccggagagtgggccagggagccctgctggatctcctacgtccactgaggaagggtcaccagcgggctcgcccaccagcactgaagaaggtgcctcgagcagtgatctcggtgagctgcctgtggacgcaagatttcctcctagagtgccaaaatcttttccattcaacacctcagtcgtgtacaaaaagactctgtttgtagaattcacggatcaccttttcaacatcgctaagccaaggccaccctggatgggtctgctaggtcctaccatccaggctgaggtttatgatacagtggtcattacacttaagaacatggcttcccatcctgtcagtcttcatgctgttggtgtatcctactggaaagcttctgagggagctgaatatgatgatcagaccagtcaaagggagaaagaagatgataaagtcttccctggtggaagccatacatatgtctggcaggtcctgaaagagaatggtccaatggcctctgacccactgtgccttacctactcatatctttctcatgtggacctggtaaaagacttgaattcaggcctcattggagccctactagtatgtagagaagggagtctggccaaggaaaagacacagaccttgcacaaatttatactactttttgctgtatttgatgaagggaaaagttggcactcagaaacaaagaactccttgatgcaggatagggatgctgcatctgctcgggcctggcctaaaatgcacacagtcaatggttatgtaaacaggtctctgccaggtctgattggatgccacaggaaatcagtctattggcatgtgattggaatgggcaccactcctgaagtgcactcaatattcctcgaaggtcacacatttcttgtgaggaaccatcgccaggctagcttggaaatctcgccaataactttccttactgctcaaacactcttgatggaccttggacagtttctactgttttgtcatatctcttcccaccaacatgatggcatggaagcttatgtcaaagtagacagctgtccagaggaaccccaactacgaatgaaaaataatgaagaagcggaagactatgatgatgatcttactgattctgaaatggatgtggtcaggtttgatgatgacaactctccttcctttatccaaattcgctcagttgccaagaagcatcctaaaacttgggtacattacattgctgctgaagaggaggactgggactatgctcccttagtcctcgcccccgatggcgcgccaaccagtacggagccgtccgaggggagcgcaccaggaagcccggctgggagcccgacttctaccgaagagggtacatctaccgaaccaagtgaaggttcagcaccaggcacctcaacagaaccctctgagggctcggcgcctggtacaagtgagtccgccaccccagaatccgggcctgggacaagcacagaaccttcggaagggagtgcccctggaacatccgaatcggcaaccccagaatcagggccaggatctgagcccgcgacttcgggctccgagacgcctgggacatccaccgagccctccgaaggatcagccccaggcaccagcacggagccctctgagggaagcgcacctggtaccagcgaaagcgcaactcccgaatcaggtcccggtacgagcgagtcggcgaccccggagagcgggccaggtgcctcgagcgacagaagttataaaagtcaatatttgaacaatggccctcagcggattggtaggaagtacaaaaaagtccgatttatggcatacacagatgaaacctttaagactcgtgaagctattcagcatgaatcaggaatcttgggacctttactttatggggaagttggagacacactgttgattatatttaagaatcaagcaagcagaccatataacatctaccctcacggaatcactgatgtccgtcctttgtattcaaggagattaccaaaaggtgtaaaacatttgaaggattttccaattctgccaggagaaatattcaaatataaatggacagtgactgtagaagatgggccaactaaatcagatcctcggtgcctgacccgctattactctagtttcgttaatatggagagagatctagcttcaggactcattggccctctcctcatctgctacaaagaatctgtagatcaaagaggaaaccagataatgtcagacaagaggaatgtcatcctgttttctgtatttgatgagaaccgaagctggtacctcacagagaatatacaacgctttctccccaatccagctggagtgcagcttgaggatccagagttccaagcctccaacatcatgcacagcatcaatggctatgtttttgatagtttgcagttgtcagtttgtttgcatgaggtggcatactggtacattctaagcattggagcacagactgacttcctttctgtcttcttctctggatataccttcaaacacaaaatggtctatgaagacacactcaccctattcccattctcaggagaaactgtcttcatgtcgatggaaaacccaggtctatggattctggggtgccacaactcagactttcggaacagaggcatgaccgccttactgaaggtttctagttgtgacaagaacactggtgattattacgaggacagttatgaagatatttcagcatacttgctgagtaaaaacaatgccattgaaccaagaagcttctctcaaaacggcgcgccaagtcccgctggaagcccaactagcaccgaagaggggacctcagagtccgccacccccgagtccggccctggctctgagcctgccactagcggctccgagactcctggcacatccgaaagcgctacacccgagagtggacccggcacctctaccgagcccagtgagggctccgcccctggaacaagcaccgagcccagcgaaggcagcgccccagggacctccacagagcccagtgaaggcagtgctcctggcaccagcaccgaaccaagcgagggctctgcacccgggacctccaccgagccaagcgaaggctctgcccctggcacttccaccgagcccagcgaaggcagcgcccctgggagccccgctggctctcccaccagcactgaggagggcacatctaccgaaccaagtgaaggctctgcaccaggtgcctcgagcccaccagtcttgaaacgccatcaagctgaaataactcgtactactcttcagtcagatcaagaggaaatcgattatgatgataccatatcagttgaaatgaagaaggaagattttgacatttatgatgaggatgaaaatcagagcccccgcagctttcaaaagaaaacacgacactattttattgctgcagtggagaggctctgggattatgggatgagtagctccccacatgttctaagaaacagggctcagagtggcagtgtccctcagttcaagaaagttgttttccaggaatttactgatggctcctttactcagcccttataccgtggagaactaaatgaacatttgggactcctggggccatatataagagcagaagttgaagataatatcatggtaactttcagaaatcaggcctctcgtccctattccttctattctagccttatttcttatgaggaagatcagaggcaaggagcagaacctagaaaaaactttgtcaagcctaatgaaaccaaaacttacttttggaaagtgcaacatcatatggcacccactaaagatgagtttgactgcaaagcctgggcttatttctctgatgttgacctggaaaaagatgtgcactcaggcctgattggaccccttctggtctgccacactaacacactgaaccctgctcatgggagacaagtgacagtacaggaatttgctctgtttttcaccatctttgatgagaccaaaagctggtacttcactgaaaatatggaaagaaactgcagggctccctgcaatatccagatggaagatcccacttttaaagagaattatcgcttccatgcaatcaatggctacataatggatacactacctggcttagtaatggctcaggatcaaaggattcgatggtatctgctcagcatgggcagcaatgaaaacatccattctattcatttcagtggacatgtgttcactgtacgaaaaaaagaggagtataaaatggcactgtacaatctctatccaggtgtttttgagacagtggaaatgttaccatccaaagctggaatttggcgggtggaatgccttattggcgagcatctacatgctgggatgagcacactttttctggtgtacagcaataagtgtcagactcccctgggaatggcttctggacacattagagattttcagattacagcttcaggacaatatggacagtgggccccaaagctggccagacttcattattccggatcaatcaatgcctggagcaccaaggagcccttttcttggatcaaggtggatctgttggcaccaatgattattcacggcatcaagacccagggtgcccgtcagaagttctccagcctctacatctctcagtttatcatcatgtatagtcttgatgggaagaagtggcagacttatcgaggaaattccactggaaccttaatggtcttctttggcaatgtggattcatctgggataaaacacaatatttttaaccctccaattattgctcgatacatccgtttgcacccaactcattatagcattcgcagcactcttcgcatggagttgatgggctgtgatttaaatagttgcagcatgccattgggaatggagagtaaagcaatatcagatgcacagattactgcttcatcctactttaccaatatgtttgccacctggtctccttcaaaagctcgacttcacctccaagggaggagtaatgcctggagacctcaggtgaataatccaaaagagtggctgcaagtggacttccagaagacaatgaaagtcacaggagtaactactcagggagtaaaatctctgcttaccagcatgtatgtgaaggagttcctcatctccagcagtcaagatggccatcagtggactctcttttttcagaatggcaaagtaaaggtttttcagggaaatcaagactccttcacacctgtggtgaactctctagacccaccgttactgactcgctaccttcgaattcacccccagagttgggtgcaccagattgccctgaggatggaggttctgggctgcgaggcacaggacctctacggcgcgccaggtacctcagagtctgctacccccgagtcagggccaggatcagagccagccacctccgggtctgagacacccgggacttccgagagtgccacccctgagtccggacccgggtccgagcccgccacttccggctccgaaactcccggcacaagcgagagcgctaccccagagtcaggaccaggaacatctacagagccctctgaaggctccgctccagggtccccagccggcagtcccactagcaccgaggagggaacctctgaaagcgccacacccgaatcagggccagggtctgagcctgctaccagcggcagcgagacaccaggcacctctgagtccgccacaccagagtccggacccggatctcccgctgggagccccacctccactgaggagggatctcctgctggctctccaacatctactgaggaaggtacctcaaccgagccatccgagggatcagctcccggcacctcagagtcggcaaccccggagtctggacccggaacttccgaaagtgccacaccagagtccggtcccgggacttcagaatcagcaacacccgagtccggccctgggtctgaacccgccacaagtggtagtgagacaccaggatcagaacctgctacctcagggtcagagacacccggatctccggcaggctcaccaacctccactgaggagggcaccagcacagaaccaagcgagggctccgcacccggaacaagcactgaacccagtgagggttcagcacccggctctgagccggccacaagtggcagtgagacacccggcacttcagagagtgccacccccgagagtggcccaggcactagtaccgagccctctgaaggcagtgcgccagcctcgagcgaacaaaaactcatctcagaagaggatctgtcacctgcaaccggtcatcatcaccatcaccattga

SEQ ID NO: 1211 - protein, 2203 aa, synthetic construct
  REGION 1..2203: note = Description of Artificial Sequence: Synthetic polypeptide
ATRRYYLGAVELSWDYMQSDLGELPVGAPGSSPSASTGTGPGSSPSASTGTGPGASPGTSSTGSPGASPGTSSTGSPGSSTPSGATGSPGSSPSASTGTGPGASPGTSSTGSPGSSPSASTGTGPGTPGSGTASSSPGSSTPSGATGSPGSSTPSGATGSPGASPGTSSTGSPASSDARFPPRVPKSFPFNTSVVYKKTLFVEFTDHLFNIAKPRPPWMGLLGPTIQAEVYDTVVITLKNMASHPVSLHAVGVSYWKASEGAEYDDQTSQREKEDDKVFPGGSHTYVWQVLKENGPMASDPLCLTYSYLSHVDLVKDLNSGLIGALLVCREGSLAKEKTQTLHKFILLFAVFDEGKSWHSETKNSLMQDRDAASARAWPKMHTVNGYVNRSLPGLIGCHRKSVYWHVIGMGTTPEVHSIFLEGHTFLVRNHRQASLEISPITFLTAQTLLMDLGQFLLFCHISSHQHDGMEAYVKVDSCPEEPQLRMKNNEEAEDYDDDLTDSEMDVVRFDDDNSPSFIQIRSVAKKHPKTWVHYIAAEEEDWDYAPLVLAPDGAPGASPGTSSTGSPGSSPSASTGTGPGSSPSASTGTGPGTPGSGTASSSPGSSTPSGATGSPGSSPSASTGTGPGASPGTSSTGSPGTPGSGTASSSPGSSTPSGATGSPGTPGSGTASSSPGASPGTSSTGSPGASPGTSSTGSPASSDRSYKSQYLNNGPQRIGRKYKKVRFMAYTDETFKTREAIQHESGILGPLLYGEVGDTLLIIFKNQASRPYNIYPHGITDVRPLYSRRLPKGVKHLKDFPILPGEIFKYKWTVTVEDGPTKSDPRCLTRYYSSFVNMERDLASGLIGPLLICYKESVDQRGNQIMSDKRNVILFSVFDENRSWYLTENIQRFLPNPAGVQLEDPEFQASNIMHSINGYVFDSLQLSVCLHEVAYWYILSIGAQTDFLSVFFSGYTFKHKMVYEDTLTLFPFSGETVFMSMENPGLWILGCHNSDFRNRGMTALLKVSSCDKNTGDYYEDSYEDISAYLLSKNNAIEPRSFSQNGAPSPAGSPTSTEEGTSESATPESGPGSEPATSGSETPGTSESATPESGPGTSTEPSEGSAPGTSTEPSEGSAPGTSTEPSEGSAPGTSTEPSEGSAPGTSTEPSEGSAPGTSTEPSEGSAPGSPAGSPTSTEEGTSTEPSEGSAPGASSPPVLKRHQAEITRTTLQSDQEEIDYDDTISVEMKKEDFDIYDEDENQSPRSFQKKTRHYFIAAVERLWDYGMSSSPHVLRNRAQSGSVPQFKKVVFQEFTDGSFTQPLYRGELNEHLGLLGPYIRAEVEDNIMVTFRNQASRPYSFYSSLISYEEDQRQGAEPRKNFVKPNETKTYFWKVQHHMAPTKDEFDCKAWAYFSDVDLEKDVHSGLIGPLLVCHTNTLNPAHGRQVTVQEFALFFTIFDETKSWYFTENMERNCRAPCNIQMEDPTFKENYRFHAINGYIMDTLPGLVMAQDQRIRWYLLSMGSNENIHSIHFSGHVFTVRKKEEYKMALYNLYPGVFETVEMLPSKAGIWRVECLIGEHLHAGMSTLFLVYSNKCQTPLGMASGHIRDFQITASGQYGQWAPKLARLHYSGSINAWSTKEPFSWIKVDLLAPMIIHGIKTQGARQKFSSLYISQFIIMYSLDGKKWQTYRGNSTGTLMVFFGNVDSSGIKHNIFNPPIIARYIRLHPTHYSIRSTLRMELMGCDLNSCSMPLGMESKAISDAQITASSYFTNMFATWSPSKARLHLQGRSNAWRPQVNNPKEWLQVDFQKTMKVTGVTTQGVKSLLTSMYVKEFLISSSQDGHQWTLFFQNGKVKVFQGNQDSFTPVVNSLDPPLLTRYLRIHPQSWVHQIALRMEVLGCEAQDLYGAPGTSESATPESGPGSEPATSGSETPGTSESATPESGPGSEPATSGSETPGTSESATPESGPGTSTEPSEGSAPGSPAGSPTSTEEGTSESATPESGPGSEPATSGSETPGTSESATPESGPGSPAGSPTSTEEGSPAGSPTSTEEGTSTEPSEGSAPGTSESATPESGPGTSESATPESGPGTSESATPESGPGSEPATSGSETPGSEPATSGSETPGSPAGSPTSTEEGTSTEPSEGSAPGTSTEPSEGSAPGSEPATSGSETPGTSESATPESGPGTSTEPSEGSAPASSEQKLISEEDLSPATGHHHHHH

SEQ ID NO: 1212 - DNA, 6612 bp, synthetic construct
  misc_feature 1..6612: note = Description of Artificial Sequence: Synthetic polynucleotide
  source 1..6612: mol_type = other DNA
gccaccagaagatactacctgggtgcagtggaactgtcatgggactatatgcaaagtgatctcggtgagctgcctgtgggcgcgccaggctccagcccctccgcgagcacgggaaccggaccaggttcgtcaccctcagcatcaacggggacgggaccgggggcgtcaccaggaacgtcctccaccggctcgccgggtgcatcacccggaacgtcatcgaccggatcgccagggagctcgacgccatcaggcgcaacaggatcacctggctcaagccctagcgcgtcaaccggcacgggtccgggtgcctcccctggcacgtccagcaccggatcacccggatcgagcccatccgcctcaaccggaaccggacccggtacaccagggtcgggaacagcctcctcgtcaccaggctcctcaaccccctcgggagccacgggttcgcccggttcgtcaacgccttccggagcaactggtagccccggagcatcgccaggaacttcgagcacggggtcgcccgcctcgagcgacgcaagatttcctcctagagtgccaaaatcttttccattcaacacctcagtcgtgtacaaaaagactctgtttgtagaattcacggatcaccttttcaacatcgctaagccaaggccaccctggatgggtctgctaggtcctaccatccaggctgaggtttatgatacagtggtcattacacttaagaacatggcttcccatcctgtcagtcttcatgctgttggtgtatcctactggaaagcttctgagggagctgaatatgatgatcagaccagtcaaagggagaaagaagatgataaagtcttccctggtggaagccatacatatgtctggcaggtcctgaaagagaatggtccaatggcctctgacccactgtgccttacctactcatatctttctcatgtggacctggtaaaagacttgaattcaggcctcattggagccctactagtatgtagagaagggagtctggccaaggaaaagacacagaccttgcacaaatttatactactttttgctgtatttgatgaagggaaaagttggcactcagaaacaaagaactccttgatgcaggatagggatgctgcatctgctcgggcctggcctaaaatgcacacagtcaatggttatgtaaacaggtctctgccaggtctgattggatgccacaggaaatcagtctattggcatgtgattggaatgggcaccactcctgaagtgcactcaatattcctcgaaggtcacacatttcttgtgaggaaccatcgccaggctagcttggaaatctcgccaataactttccttactgctcaaacactcttgatggaccttggacagtttctactgttttgtcatatctcttcccaccaacatgatggcatggaagcttatgtcaaagtagacagctgtccagaggaaccccaactacgaatgaaaaataatgaagaagcggaagactatgatgatgatcttactgattctgaaatggatgtggtcaggtttgatgatgacaactctccttcctttatccaaattcgctcagttgccaagaagcatcctaaaacttgggtacattacattgctgctgaagaggaggactgggactatgctcccttagtcctcgcccccgatggcgcgccaggtgcctcgccgggaacatcatcaactggttcacccgggtcatccccctcggcctcaaccgggacgggtcccggctcatcccccagcgccagcactggaacaggtcctggcactcctggttccggtacggcatcgtcatccccgggaagctcaacaccgtccggagcgacaggatcacctggctcgtcaccttcggcgtcaactggaacggggccaggggcctcacccggaacgtcctcgactgggtcgcctggtacgccgggatcaggaacggcctcatcctcgcctgggtcctcaacgccctcgggtgcgactggttcgccgggaactcctggctcggggacggcctcgtcgtcgcctggggcatcaccggggacgagctccacggggtcccctggagcgtcaccggggacctcctcgacaggtagcccggcctcgagcgacagaagttataaaagtcaatatttgaacaatggccctcagcggattggtaggaagtacaaaaaagtccgatttatggcatacacagatgaaacctttaagactcgtgaagctattcagcatgaatcaggaatcttgggacctttactttatggggaagttggagacacactgttgattatatttaagaatcaagcaagcagaccatataacatctaccctcacggaatcactgatgtccgtcctttgtattcaaggagattaccaaaaggtgtaaaacatttgaaggattttccaattctgccaggagaaatattcaaatataaatggacagtgactgtagaagatgggccaactaaatcagatcctcggtgcctgacccgctattactctagtttcgttaatatggagagagatctagcttcaggactcattggccctctcctcatctgctacaaagaatctgtagatcaaagaggaaaccagataatgtcagacaagaggaatgtcatcctgttttctgtatttgatgagaaccgaagctggtacctcacagagaatatacaacgctttctccccaatccagctggagtgcagcttgaggatccagagttccaagcctccaacatcatgcacagcatcaatggctatgtttttgatagtttgcagttgtcagtttgtttgcatgaggtggcatactggtacattctaagcattggagcacagactgacttcctttctgtcttcttctctggatataccttcaaacacaaaatggtctatgaagacacactcaccctattcccattctcaggagaaactgtcttcatgtcgatggaaaacccaggtctatggattctggggtgccacaactcagactttcggaacagaggcatgaccgccttactgaaggtttctagttgtgacaagaacactggtgattattacgaggacagttatgaagatatttcagcatacttgctgagtaaaaacaatgccattgaaccaagaagcttctctcaaaacggcgcgccaagtcccgctggaagcccaactagcaccgaagaggggacctcagagtccgccacccccgagtccggccctggctctgagcctgccactagcggctccgagactcctggcacatccgaaagcgctacacccgagagtggacccggcacctctaccgagcccagtgagggctccgcccctggaacaagcaccgagcccagcgaaggcagcgccccagggacctccacagagcccagtgaaggcagtgctcctggcaccagcaccgaaccaagcgagggctctgcacccgggacctccaccgagccaagcgaaggctctgcccctggcacttccaccgagcccagcgaaggcagcgcccctgggagccccgctggctctcccaccagcactgaggagggcacatctaccgaaccaagtgaaggctctgcaccaggtgcctcgagcccaccagtcttgaaacgccatcaagctgaaataactcgtactactcttcagtcagatcaagaggaaatcgattatgatgataccatatcagttgaaatgaagaaggaagattttgacatttatgatgaggatgaaaatcagagcccccgcagctttcaaaagaaaacacgacactattttattgctgcagtggagaggctctgggattatgggatgagtagctccccacatgttctaagaaacagggctcagagtggcagtgtccctcagttcaagaaagttgttttccaggaatttactgatggctcctttactcagcccttataccgtggagaactaaatgaacatttgggactcctggggccatatataagagcagaagttgaagataatatcatggtaactttcagaaatcaggcctctcgtccctattccttctattctagccttatttcttatgaggaagatcagaggcaaggagcagaacctagaaaaaactttgtcaagcctaatgaaaccaaaacttacttttggaaagtgcaacatcatatggcacccactaaagatgagtttgactgcaaagcctgggcttatttctctgatgttgacctggaaaaagatgtgcactcaggcctgattggaccccttctggtctgccacactaacacactgaaccctgctcatgggagacaagtgacagtacaggaatttgctctgtttttcaccatctttgatgagaccaaaagctggtacttcactgaaaatatggaaagaaactgcagggctccctgcaatatccagatggaagatcccacttttaaagagaattatcgcttccatgcaatcaatggctacataatggatacactacctggcttagtaatggctcaggatcaaaggattcgatggtatctgctcagcatgggcagcaatgaaaacatccattctattcatttcagtggacatgtgttcactgtacgaaaaaaagaggagtataaaatggcactgtacaatctctatccaggtgtttttgagacagtggaaatgttaccatccaaagctggaatttggcgggtggaatgccttattggcgagcatctacatgctgggatgagcacactttttctggtgtacagcaataagtgtcagactcccctgggaatggcttctggacacattagagattttcagattacagcttcaggacaatatggacagtgggccccaaagctggccagacttcattattccggatcaatcaatgcctggagcaccaaggagcccttttcttggatcaaggtggatctgttggcaccaatgattattcacggcatcaagacccagggtgcccgtcagaagttctccagcctctacatctctcagtttatcatcatgtatagtcttgatgggaagaagtggcagacttatcgaggaaattccactggaaccttaatggtcttctttggcaatgtggattcatctgggataaaacacaatatttttaaccctccaattattgctcgatacatccgtttgcacccaactcattatagcattcgcagcactcttcgcatggagttgatgggctgtgatttaaatagttgcagcatgccattgggaatggagagtaaagcaatatcagatgcacagattactgcttcatcctactttaccaatatgtttgccacctggtctccttcaaaagctcgacttcacctccaagggaggagtaatgcctggagacctcaggtgaataatccaaaagagtggctgcaagtggacttccagaagacaatgaaagtcacaggagtaactactcagggagtaaaatctctgcttaccagcatgtatgtgaaggagttcctcatctccagcagtcaagatggccatcagtggactctcttttttcagaatggcaaagtaaaggtttttcagggaaatcaagactccttcacacctgtggtgaactctctagacccaccgttactgactcgctaccttcgaattcacccccagagttgggtgcaccagattgccctgaggatggaggttctgggctgcgaggcacaggacctctacggcgcgccaggtacctcagagtctgctacccccgagtcagggccaggatcagagccagccacctccgggtctgagacacccgggacttccgagagtgccacccctgagtccggacccgggtccgagcccgccacttccggctccgaaactcccggcacaagcgagagcgctaccccagagtcaggaccaggaacatctacagagccctctgaaggctccgctccagggtccccagccggcagtcccactagcaccgaggagggaacctctgaaagcgccacacccgaatcagggccagggtctgagcctgctaccagcggcagcgagacaccaggcacctctgagtccgccacaccagagtccggacccggatctcccgctgggagccccacctccactgaggagggatctcctgctggctctccaacatctactgaggaaggtacctcaaccgagccatccgagggatcagctcccggcacctcagagtcggcaaccccggagtctggacccggaacttccgaaagtgccacaccagagtccggtcccgggacttcagaatcagcaacacccgagtccggccctgggtctgaacccgccacaagtggtagtgagacaccaggatcagaacctgctacctcagggtcagagacacccggatctccggcaggctcaccaacctccactgaggagggcaccagcacagaaccaagcgagggctccgcacccggaacaagcactgaacccagtgagggttcagcacccggctctgagccggccacaagtggcagtgagacacccggcacttcagagagtgccacccccgagagtggcccaggcactagtaccgagccctctgaaggcagtgcgccagcctcgagcgaacaaaaactcatctcagaagaggatctgtcacctgcaaccggtcatcatcaccatcaccattga

SEQ ID NO: 1213 - protein, 2203 aa, synthetic construct
  REGION 1..2203: note = Description of Artificial Sequence: Synthetic polypeptide
ATRRYYLGAVELSWDYMQGAPTSESATPESGPGSEPATSGSETPGTSESATPESGPGSEPATSGSETPGTSESATPESGPGTSTEPSEGSAPGSPAGSPTSTEEGTSESATPESGPGSEPATSGSETPGTSESATPESGPGSPAGSPTSTEEGSPAGSPTSTEEGASSSDLGELPVDARFPPRVPKSFPFNTSVVYKKTLFVEFTDHLFNIAKPRPPWMGLLGPTIQAEVYDTVVITLKNMASHPVSLHAVGVSYWKASEGAEYDDQTSQREKEDDKVFPGGSHTYVWQVLKENGPMASDPLCLTYSYLSHVDLVKDLNSGLIGALLVCREGSLAKEKTQTLHKFILLFAVFDEGKSWHSETKNSLMQDRDAASARAWPKMHTVNGYVNRSLPGLIGCHRKSVYWHVIGMGTTPEVHSIFLEGHTFLVRNHRQASLEISPITFLTAQTLLMDLGQFLLFCHISSHQHDGMEAYVKVDSCPEEPQLRMKNNEEAEDYDDDLTDSEMDVVRFDDDNSPSFIQIRSVAKKHPKTWVHYIAAEEEDWDYAPLVLAPDGAPGASPGTSSTGSPGSSPSASTGTGPGSSPSASTGTGPGTPGSGTASSSPGSSTPSGATGSPGSSPSASTGTGPGASPGTSSTGSPGTPGSGTASSSPGSSTPSGATGSPGTPGSGTASSSPGASPGTSSTGSPGASPGTSSTGSPASSDRSYKSQYLNNGPQRIGRKYKKVRFMAYTDETFKTREAIQHESGILGPLLYGEVGDTLLIIFKNQASRPYNIYPHGITDVRPLYSRRLPKGVKHLKDFPILPGEIFKYKWTVTVEDGPTKSDPRCLTRYYSSFVNMERDLASGLIGPLLICYKESVDQRGNQIMSDKRNVILFSVFDENRSWYLTENIQRFLPNPAGVQLEDPEFQASNIMHSINGYVFDSLQLSVCLHEVAYWYILSIGAQTDFLSVFFSGYTFKHKMVYEDTLTLFPFSGETVFMSMENPGLWILGCHNSDFRNRGMTALLKVSSCDKNTGDYYEDSYEDISAYLLSKNNAIEPRSFSQNGAPSPAGSPTSTEEGTSESATPESGPGSEPATSGSETPGTSESATPESGPGTSTEPSEGSAPGTSTEPSEGSAPGTSTEPSEGSAPGTSTEPSEGSAPGTSTEPSEGSAPGTSTEPSEGSAPGSPAGSPTSTEEGTSTEPSEGSAPGASSPPVLKRHQAEITRTTLQSDQEEIDYDDTISVEMKKEDFDIYDEDENQSPRSFQKKTRHYFIAAVERLWDYGMSSSPHVLRNRAQSGSVPQFKKVVFQEFTDGSFTQPLYRGELNEHLGLLGPYIRAEVEDNIMVTFRNQASRPYSFYSSLISYEEDQRQGAEPRKNFVKPNETKTYFWKVQHHMAPTKDEFDCKAWAYFSDVDLEKDVHSGLIGPLLVCHTNTLNPAHGRQVTVQEFALFFTIFDETKSWYFTENMERNCRAPCNIQMEDPTFKENYRFHAINGYIMDTLPGLVMAQDQRIRWYLLSMGSNENIHSIHFSGHVFTVRKKEEYKMALYNLYPGVFETVEMLPSKAGIWRVECLIGEHLHAGMSTLFLVYSNKCQTPLGMASGHIRDFQITASGQYGQWAPKLARLHYSGSINAWSTKEPFSWIKVDLLAPMIIHGIKTQGARQKFSSLYISQFIIMYSLDGKKWQTYRGNSTGTLMVFFGNVDSSGIKHNIFNPPIIARYIRLHPTHYSIRSTLRMELMGCDLNSCSMPLGMESKAISDAQITASSYFTNMFATWSPSKARLHLQGRSNAWRPQVNNPKEWLQVDFQKTMKVTGVTTQGVKSLLTSMYVKEFLISSSQDGHQWTLFFQNGKVKVFQGNQDSFTPVVNSLDPPLLTRYLRIHPQSWVHQIALRMEVLGCEAQDLYGAPGTSESATPESGPGSEPATSGSETPGTSESATPESGPGSEPATSGSETPGTSESATPESGPGTSTEPSEGSAPGSPAGSPTSTEEGTSESATPESGPGSEPATSGSETPGTSESATPESGPGSPAGSPTSTEEGSPAGSPTSTEEGTSTEPSEGSAPGTSESATPESGPGTSESATPESGPGTSESATPESGPGSEPATSGSETPGSEPATSGSETPGSPAGSPTSTEEGTSTEPSEGSAPGTSTEPSEGSAPGSEPATSGSETPGTSESATPESGPGTSTEPSEGSAPASSEQKLISEEDLSPATGHHHHHH

SEQ ID NO: 1214 - DNA, 6612 bp, synthetic construct
  misc_feature 1..6612: note = Description of Artificial Sequence: Synthetic polynucleotide
  source 1..6612: mol_type = other DNA
gccaccagaagatactacctgggtgcagtggaactgtcatgggactatatgcaaggcgcgccaacatcagagagcgccacccctgaaagtggtcccgggagcgagccagccacatctgggtcggaaacgccaggcacaagtgagtctgcaactcccgagtccggacctggctccgagcctgccactagcggctccgagactccgggaacttccgagagcgctacaccagaaagcggacccggaaccagtaccgaacctagcgagggctctgctccgggcagcccagccggctctcctacatccacggaggagggcacttccgaatccgccaccccggagtcagggccaggatctgaacccgctacctcaggcagtgagacgccaggaacgagcgagtccgctacaccggagagtgggccagggagccctgctggatctcctacgtccactgaggaagggtcaccagcgggctcgcccaccagcactgaagaaggtgcctcgagcagtgatctcggtgagctgcctgtggacgcaagatttcctcctagagtgccaaaatcttttccattcaacacctcagtcgtgtacaaaaagactctgtttgtagaattcacggatcaccttttcaacatcgctaagccaaggccaccctggatgggtctgctaggtcctaccatccaggctgaggtttatgatacagtggtcattacacttaagaacatggcttcccatcctgtcagtcttcatgctgttggtgtatcctactggaaagcttctgagggagctgaatatgatgatcagaccagtcaaagggagaaagaagatgataaagtcttccctggtggaagccatacatatgtctggcaggtcctgaaagagaatggtccaatggcctctgacccactgtgccttacctactcatatctttctcatgtggacctggtaaaagacttgaattcaggcctcattggagccctactagtatgtagagaagggagtctggccaaggaaaagacacagaccttgcacaaatttatactactttttgctgtatttgatgaagggaaaagttggcactcagaaacaaagaactccttgatgcaggatagggatgctgcatctgctcgggcctggcctaaaatgcacacagtcaatggttatgtaaacaggtctctgccaggtctgattggatgccacaggaaatcagtctattggcatgtgattggaatgggcaccactcctgaagtgcactcaatattcctcgaaggtcacacatttcttgtgaggaaccatcgccaggctagcttggaaatctcgccaataactttccttactgctcaaacactcttgatggaccttggacagtttctactgttttgtcatatctcttcccaccaacatgatggcatggaagcttatgtcaaagtagacagctgtccagaggaaccccaactacgaatgaaaaataatgaagaagcggaagactatgatgatgatcttactgattctgaaatggatgtggtcaggtttgatgatgacaactctccttcctttatccaaattcgctcagttgccaagaagcatcctaaaacttgggtacattacattgctgctgaagaggaggactgggactatgctcccttagtcctcgcccccgatggcgcgccaggtgcctcgccgggaacatcatcaactggttcacccgggtcatccccctcggcctcaaccgggacgggtcccggctcatcccccagcgccagcactggaacaggtcctggcactcctggttccggtacggcatcgtcatccccgggaagctcaacaccgtccggagcgacaggatcacctggctcgtcaccttcggcgtcaactggaacggggccaggggcctcacccggaacgtcctcgactgggtcgcctggtacgccgggatcaggaacggcctcatcctcgcctgggtcctcaacgccctcgggtgcgactggttcgccgggaactcctggctcggggacggcctcgtcgtcgcctggggcatcaccggggacgagctccacggggtcccctggagcgtcaccggggacctcctcgacaggtagcccggcctcgagcgacagaagttataaaagtcaatatttgaacaatggccctcagcggattggtaggaagtacaaaaaagtccgatttatggcatacacagatgaaacctttaagactcgtgaagctattcagcatgaatcaggaatcttgggacctttactttatggggaagttggagacacactgttgattatatttaagaatcaagcaagcagaccatataacatctaccctcacggaatcactgatgtccgtcctttgtattcaaggagattaccaaaaggtgtaaaacatttgaaggattttccaattctgccaggagaaatattcaaatataaatggacagtgactgtagaagatgggccaactaaatcagatcctcggtgcctgacccgctattactctagtttcgttaatatggagagagatctagcttcaggactcattggccctctcctcatctgctacaaagaatctgtagatcaaagaggaaaccagataatgtcagacaagaggaatgtcatcctgttttctgtatttgatgagaaccgaagctggtacctcacagagaatatacaacgctttctccccaatccagctggagtgcagcttgaggatccagagttccaagcctccaacatcatgcacagcatcaatggctatgtttttgatagtttgcagttgtcagtttgtttgcatgaggtggcatactggtacattctaagcattggagcacagactgacttcctttctgtcttcttctctggatataccttcaaacacaaaatggtctatgaagacacactcaccctattcccattctcaggagaaactgtcttcatgtcgatggaaaacccaggtctatggattctggggtgccacaactcagactttcggaacagaggcatgaccgccttactgaaggtttctagttgtgacaagaacactggtgattattacgaggacagttatgaagatatttcagcatacttgctgagtaaaaacaatgccattgaaccaagaagcttctctcaaaacggcgcgccaagtcccgctggaagcccaactagcaccgaagaggggacctcagagtccgccacccccgagtccggccctggctctgagcctgccactagcggctccgagactcctggcacatccgaaagcgctacacccgagagtggacccggcacctctaccgagcccagtgagggctccgcccctggaacaagcaccgagcccagcgaaggcagcgccccagggacctccacagagcccagtgaaggcagtgctcctggcaccagcaccgaaccaagcgagggctctgcacccgggacctccaccgagccaagcgaaggctctgcccctggcacttccaccgagcccagcgaaggcagcgcccctgggagccccgctggctctcccaccagcactgaggagggcacatctaccgaaccaagtgaaggctctgcaccaggtgcctcgagcccaccagtcttgaaacgccatcaagctgaaataactcgtactactcttcagtcagatcaagaggaaatcgattatgatgataccatatcagttgaaatgaagaaggaagattttgacatttatgatgaggatgaaaatcagagcccccgcagctttcaaaagaaaacacgacactattttattgctgcagtggagaggctctgggattatgggatgagtagctccccacatgttctaagaaacagggctcagagtggcagtgtccctcagttcaagaaagttgttttccaggaatttactgatggctcctttactcagcccttataccgtggagaactaaatgaacatttgggactcctggggccatatataagagcagaagttgaagataatatcatggtaactttcagaaatcaggcctctcgtccctattccttctattctagccttatttcttatgaggaagatcagaggcaaggagcagaacctagaaaaaactttgtcaagcctaatgaaaccaaaacttacttttggaaagtgcaacatcatatggcacccactaaagatgagtttgactgcaaagcctgggcttatttctctgatgttgacctggaaaaagatgtgcactcaggcctgattggaccccttctggtctgccacactaacacactgaaccctgctcatgggagacaagtgacagtacaggaatttgctctgtttttcaccatctttgatgagaccaaaagctggtacttcactgaaaatatggaaagaaactgcagggctccctgcaatatccagatggaagatcccacttttaaagagaattatcgcttccatgcaatcaatggctacataatggatacactacctggcttagtaatggctcaggatcaaaggattcgatggtatctgctcagcatgggcagcaatgaaaacatccattctattcatttcagtggacatgtgttcactgtacgaaaaaaagaggagtataaaatggcactgtacaatctctatccaggtgtttttgagacagtggaaatgttaccatccaaagctggaatttggcgggtggaatgccttattggcgagcatctacatgctgggatgagcacactttttctggtgtacagcaataagtgtcagactcccctgggaatggcttctggacacattagagattttcagattacagcttcaggacaatatggacagtgggccccaaagctggccagacttcattattccggatcaatcaatgcctggagcaccaaggagcccttttcttggatcaaggtggatctgttggcaccaatgattattcacggcatcaagacccagggtgcccgtcagaagttctccagcctctacatctctcagtttatcatcatgtatagtcttgatgggaagaagtggcagacttatcgaggaaattccactggaaccttaatggtcttctttggcaatgtggattcatctgggataaaacacaatatttttaaccctccaattattgctcgatacatccgtttgcacccaactcattatagcattcgcagcactcttcgcatggagttgatgggctgtgatttaaatagttgcagcatgccattgggaatggagagtaaagcaatatcagatgcacagattactgcttcatcctactttaccaatatgtttgccacctggtctccttcaaaagctcgacttcacctccaagggaggagtaatgcctggagacctcaggtgaataatccaaaagagtggctgcaagtggacttccagaagacaatgaaagtcacaggagtaactactcagggagtaaaatctctgcttaccagcatgtatgtgaaggagttcctcatctccagcagtcaagatggccatcagtggactctcttttttcagaatggcaaagtaaaggtttttcagggaaatcaagactccttcacacctgtggtgaactctctagacccaccgttactgactcgctaccttcgaattcacccccagagttgggtgcaccagattgccctgaggatggaggttctgggctgcgaggcacaggacctctacggcgcgccaggtacctcagagtctgctacccccgagtcagggccaggatcagagccagccacctccgggtctgagacacccgggacttccgagagtgccacccctgagtccggacccgggtccgagcccgccacttccggctccgaaactcccggcacaagcgagagcgctaccccagagtcaggaccaggaacatctacagagccctctgaaggctccgctccagggtccccagccggcagtcccactagcaccgaggagggaacctctgaaagcgccacacccgaatcagggccagggtctgagcctgctaccagcggcagcgagacaccaggcacctctgagtccgccacaccagagtccggacccggatctcccgctgggagccccacctccactgaggagggatctcctgctggctctccaacatctactgaggaaggtacctcaaccgagccatccgagggatcagctcccggcacctcagagtcggcaaccccggagtctggacccggaacttccgaaagtgccacaccagagtccggtcccgggacttcagaatcagcaacacccgagtccggccctgggtctgaacccgccacaagtggtagtgagacaccaggatcagaacctgctacctcagggtcagagacacccggatctccggcaggctcaccaacctccactgaggagggcaccagcacagaaccaagcgagggctccgcacccggaacaagcactgaacccagtgagggttcagcacccggctctgagccggccacaagtggcagtgagacacccggcacttcagagagtgccacccccgagagtggcccaggcactagtaccgagccctctgaaggcagtgcgccagcctcgagcgaacaaaaactcatctcagaagaggatctgtcacctgcaaccggtcatcatcaccatcaccattga

SEQ ID NO: 1215 - protein, 2203 aa, synthetic construct
  REGION 1..2203: note = Description of Artificial Sequence: Synthetic polypeptide
ATRRYYLGAVELSWDYMQSDLGELPVDARFPPRVPKSFPFGAPGSSPSASTGTGPGSSPSASTGTGPGASPGTSSTGSPGASPGTSSTGSPGSSTPSGATGSPGSSPSASTGTGPGASPGTSSTGSPGSSPSASTGTGPGTPGSGTASSSPGSSTPSGATGSPGSSTPSGATGSPGASPGTSSTGSPASSNTSVVYKKTLFVEFTDHLFNIAKPRPPWMGLLGPTIQAEVYDTVVITLKNMASHPVSLHAVGVSYWKASEGAEYDDQTSQREKEDDKVFPGGSHTYVWQVLKENGPMASDPLCLTYSYLSHVDLVKDLNSGLIGALLVCREGSLAKEKTQTLHKFILLFAVFDEGKSWHSETKNSLMQDRDAASARAWPKMHTVNGYVNRSLPGLIGCHRKSVYWHVIGMGTTPEVHSIFLEGHTFLVRNHRQASLEISPITFLTAQTLLMDLGQFLLFCHISSHQHDGMEAYVKVDSCPEEPQLRMKNNEEAEDYDDDLTDSEMDVVRFDDDNSPSFIQIRSVAKKHPKTWVHYIAAEEEDWDYAPLVLAPDGAPGASPGTSSTGSPGSSPSASTGTGPGSSPSASTGTGPGTPGSGTASSSPGSSTPSGATGSPGSSPSASTGTGPGASPGTSSTGSPGTPGSGTASSSPGSSTPSGATGSPGTPGSGTASSSPGASPGTSSTGSPGASPGTSSTGSPASSDRSYKSQYLNNGPQRIGRKYKKVRFMAYTDETFKTREAIQHESGILGPLLYGEVGDTLLIIFKNQASRPYNIYPHGITDVRPLYSRRLPKGVKHLKDFPILPGEIFKYKWTVTVEDGPTKSDPRCLTRYYSSFVNMERDLASGLIGPLLICYKESVDQRGNQIMSDKRNVILFSVFDENRSWYLTENIQRFLPNPAGVQLEDPEFQASNIMHSINGYVFDSLQLSVCLHEVAYWYILSIGAQTDFLSVFFSGYTFKHKMVYEDTLTLFPFSGETVFMSMENPGLWILGCHNSDFRNRGMTALLKVSSCDKNTGDYYEDSYEDISAYLLSKNNAIEPRSFSQNGAPSPAGSPTSTEEGTSESATPESGPGSEPATSGSETPGTSESATPESGPGTSTEPSEGSAPGTSTEPSEGSAPGTSTEPSEGSAPGTSTEPSEGSAPGTSTEPSEGSAPGTSTEPSEGSAPGSPAGSPTSTEEGTSTEPSEGSAPGASSPPVLKRHQAEITRTTLQSDQEEIDYDDTISVEMKKEDFDIYDEDENQSPRSFQKKTRHYFIAAVERLWDYGMSSSPHVLRNRAQSGSVPQFKKVVFQEFTDGSFTQPLYRGELNEHLGLLGPYIRAEVEDNIMVTFRNQASRPYSFYSSLISYEEDQRQGAEPRKNFVKPNETKTYFWKVQHHMAPTKDEFDCKAWAYFSDVDLEKDVHSGLIGPLLVCHTNTLNPAHGRQVTVQEFALFFTIFDETKSWYFTENMERNCRAPCNIQMEDPTFKENYRFHAINGYIMDTLPGLVMAQDQRIRWYLLSMGSNENIHSIHFSGHVFTVRKKEEYKMALYNLYPGVFETVEMLPSKAGIWRVECLIGEHLHAGMSTLFLVYSNKCQTPLGMASGHIRDFQITASGQYGQWAPKLARLHYSGSINAWSTKEPFSWIKVDLLAPMIIHGIKTQGARQKFSSLYISQFIIMYSLDGKKWQTYRGNSTGTLMVFFGNVDSSGIKHNIFNPPIIARYIRLHPTHYSIRSTLRMELMGCDLNSCSMPLGMESKAISDAQITASSYFTNMFATWSPSKARLHLQGRSNAWRPQVNNPKEWLQVDFQKTMKVTGVTTQGVKSLLTSMYVKEFLISSSQDGHQWTLFFQNGKVKVFQGNQDSFTPVVNSLDPPLLTRYLRIHPQSWVHQIALRMEVLGCEAQDLYGAPGTSESATPESGPGSEPATSGSETPGTSESATPESGPGSEPATSGSETPGTSESATPESGPGTSTEPSEGSAPGSPAGSPTSTEEGTSESATPESGPGSEPATSGSETPGTSESATPESGPGSPAGSPTSTEEGSPAGSPTSTEEGTSTEPSEGSAPGTSESATPESGPGTSESATPESGPGTSESATPESGPGSEPATSGSETPGSEPATSGSETPGSPAGSPTSTEEGTSTEPSEGSAPGTSTEPSEGSAPGSEPATSGSETPGTSESATPESGPGTSTEPSEGSAPASSEQKLISEEDLSPATGHHHHHH

SEQ ID NO: 1216 - DNA, 6612 bp, synthetic construct
  misc_feature 1..6612: note = Description of Artificial Sequence: Synthetic polynucleotide
  source 1..6612: mol_type = other DNA
gccaccagaagatactacctgggtgcagtggaactgtcatgggactatatgcaaagtgatctcggtgagctgcctgtggacgcaagatttcctcctagagtgccaaaatcttttccattcggcgcgccaggctccagcccctccgcgagcacgggaaccggaccaggttcgtcaccctcagcatcaacggggacgggaccgggggcgtcaccaggaacgtcctccaccggctcgccgggtgcatcacccggaacgtcatcgaccggatcgccagggagctcgacgccatcaggcgcaacaggatcacctggctcaagccctagcgcgtcaaccggcacgggtccgggtgcctcccctggcacgtccagcaccggatcacccggatcgagcccatccgcctcaaccggaaccggacccggtacaccagggtcgggaacagcctcctcgtcaccaggctcctcaaccccctcgggagccacgggttcgcccggttcgtcaacgccttccggagcaactggtagccccggagcatcgccaggaacttcgagcacggggtcgcccgcctcgagcaacacctcagtcgtgtacaaaaagactctgtttgtagaattcacggatcaccttttcaacatcgctaagccaaggccaccctggatgggtctgctaggtcctaccatccaggctgaggtttatgatacagtggtcattacacttaagaacatggcttcccatcctgtcagtcttcatgctgttggtgtatcctactggaaagcttctgagggagctgaatatgatgatcagaccagtcaaagggagaaagaagatgataaagtcttccctggtggaagccatacatatgtctggcaggtcctgaaagagaatggtccaatggcctctgacccactgtgccttacctactcatatctttctcatgtggacctggtaaaagacttgaattcaggcctcattggagccctactagtatgtagagaagggagtctggccaaggaaaagacacagaccttgcacaaatttatactactttttgctgtatttgatgaagggaaaagttggcactcagaaacaaagaactccttgatgcaggatagggatgctgcatctgctcgggcctggcctaaaatgcacacagtcaatggttatgtaaacaggtctctgccaggtctgattggatgccacaggaaatcagtctattggcatgtgattggaatgggcaccactcctgaagtgcactcaatattcctcgaaggtcacacatttcttgtgaggaaccatcgccaggctagcttggaaatctcgccaataactttccttactgctcaaacactcttgatggaccttggacagtttctactgttttgtcatatctcttcccaccaacatgatggcatggaagcttatgtcaaagtagacagctgtccagaggaaccccaactacgaatgaaaaataatgaagaagcggaagactatgatgatgatcttactgattctgaaatggatgtggtcaggtttgatgatgacaactctccttcctttatccaaattcgctcagttgccaagaagcatcctaaaacttgggtacattacattgctgctgaagaggaggactgggactatgctcccttagtcctcgcccccgatggcgcgccaggtgcctcgccgggaacatcatcaactggttcacccgggtcatccccctcggcctcaaccgggacgggtcccggctcatcccccagcgccagcactggaacaggtcctggcactcctggttccggtacggcatcgtcatccccgggaagctcaacaccgtccggagcgacaggatcacctggctcgtcaccttcggcgtcaactggaacggggccaggggcctcacccggaacgtcctcgactgggtcgcctggtacgccgggatcaggaacggcctcatcctcgcctgggtcctcaacgccctcgggtgcgactggttcgccgggaactcctggctcggggacggcctcgtcgtcgcctggggcatcaccggggacgagctccacggggtcccctggagcgtcaccggggacctcctcgacaggtagcccggcctcgagcgacagaagttataaaagtcaatatttgaacaatggccctcagcggattggtaggaagtacaaaaaagtccgatttatggcatacacagatgaaacctttaagactcgtgaagctattcagcatgaatcaggaatcttgggacctttactttatggggaagttggagacacactgttgattatatttaagaatcaagcaagcagaccatataacatctaccctcacggaatcactgatgtccgtcctttgtattcaaggagattaccaaaaggtgtaaaacatttgaaggattttccaattctgccaggagaaatattcaaatataaatggacagtgactgtagaagatgggccaactaaatcagatcctcggtgcctgacccgctattactctagtttcgttaatatggagagagatctagcttcaggactcattggccctctcctcatctgctacaaagaatctgtagatcaaagaggaaaccagataatgtcagacaagaggaatgtcatcctgttttctgtatttgatgagaaccgaagctggtacctcacagagaatatacaacgctttctccccaatccagctggagtgcagcttgaggatccagagttccaagcctccaacatcatgcacagcatcaatggctatgtttttgatagtttgcagttgtcagtttgtttgcatgaggtggcatactggtacattctaagcattggagcacagactgacttcctttctgtcttcttctctggatataccttcaaacacaaaatggtctatgaagacacactcaccctattcccattctcaggagaaactgtcttcatgtcgatggaaaacccaggtctatggattctggggtgccacaactcagactttcggaacagaggcatgaccgccttactgaaggtttctagttgtgacaagaacactggtgattattacgaggacagttatgaagatatttcagcatacttgctgagtaaaaacaatgccattgaaccaagaagcttctctcaaaacggcgcgccaagtcccgctggaagcccaactagcaccgaagaggggacctcagagtccgccacccccgagtccggccctggctctgagcctgccactagcggctccgagactcctggcacatccgaaagcgctacacccgagagtggacccggcacctctaccgagcccagtgagggctccgcccctggaacaagcaccgagcccagcgaaggcagcgccccagggacctccacagagcccagtgaaggcagtgctcctggcaccagcaccgaaccaagcgagggctctgcacccgggacctccaccgagccaagcgaaggctctgcccctggcacttccaccgagcccagcgaaggcagcgcccctgggagccccgctggctctcccaccagcactgaggagggcacatctaccgaaccaagtgaaggctctgcaccaggtgcctcgagcccaccagtcttgaaacgccatcaagctgaaataactcgtactactcttcagtcagatcaagaggaaatcgattatgatgataccatatcagttgaaatgaagaaggaagattttgacatttatgatgaggatgaaaatcagagcccccgcagctttcaaaagaaaacacgacactattttattgctgcagtggagaggctctgggattatgggatgagtagctccccacatgttctaagaaacagggctcagagtggcagtgtccctcagttcaagaaagttgttttccaggaatttactgatggctcctttactcagcccttataccgtggagaactaaatgaacatttgggactcctggggccatatataagagcagaagttgaagataatatcatggtaactttcagaaatcaggcctctcgtccctattccttctattctagccttatttcttatgaggaagatcagaggcaaggagcagaacctagaaaaaactttgtcaagcctaatgaaaccaaaacttacttttggaaagtgcaacatcatatggcacccactaaagatgagtttgactgcaaagcctgggcttatttctctgatgttgacctggaaaaagatgtgcactcaggcctgattggaccccttctggtctgccacactaacacactgaaccctgctcatgggagacaagtgacagtacaggaatttgctctgtttttcaccatctttgatgagaccaaaagctggtacttcactgaaaatatggaaagaaactgcagggctccctgcaatatccagatggaagatcccacttttaaagagaattatcgcttccatgcaatcaatggctacataatggatacactacctggcttagtaatggctcaggatcaaaggattcgatggtatctgctcagcatgggcagcaatgaaaacatccattctattcatttcagtggacatgtgttcactgtacgaaaaaaagaggagtataaaatggcactgtacaatctctatccaggtgtttttgagacagtggaaatgttaccatccaaagctggaatttggcgggtggaatgccttattggcgagcatctacatgctgggatgagcacactttttctggtgtacagcaataagtgtcagactcccctgggaatggcttctggacacattagagattttcagattacagcttcaggacaatatggacagtgggccccaaagctggccagacttcattattccggatcaatcaatgcctggagcaccaaggagcccttttcttggatcaaggtggatctgttggcaccaatgattattcacggcatcaagacccagggtgcccgtcagaagttctccagcctctacatctctcagtttatcatcatgtatagtcttgatgggaagaagtggcagacttatcgaggaaattccactggaaccttaatggtcttctttggcaatgtggattcatctgggataaaacacaatatttttaaccctccaattattgctcgatacatccgtttgcacccaactcattatagcattcgcagcactcttcgcatggagttgatgggctgtgatttaaatagttgcagcatgccattgggaatggagagtaaagcaatatcagatgcacagattactgcttcatcctactttaccaatatgtttgccacctggtctccttcaaaagctcgacttcacctccaagggaggagtaatgcctggagacctcaggtgaataatccaaaagagtggctgcaagtggacttccagaagacaatgaaagtcacaggagtaactactcagggagtaaaatctctgcttaccagcatgtatgtgaaggagttcctcatctccagcagtcaagatggccatcagtggactctcttttttcagaatggcaaagtaaaggtttttcagggaaatcaagactccttcacacctgtggtgaactctctagacccaccgttactgactcgctaccttcgaattcacccccagagttgggtgcaccagattgccctgaggatggaggttctgggctgcgaggcacaggacctctacggcgcgccaggtacctcagagtctgctacccccgagtcagggccaggatcagagccagccacctccgggtctgagacacccgggacttccgagagtgccacccctgagtccggacccgggtccgagcccgccacttccggctccgaaactcccggcacaagcgagagcgctaccccagagtcaggaccaggaacatctacagagccctctgaaggctccgctccagggtccccagccggcagtcccactagcaccgaggagggaacctctgaaagcgccacacccgaatcagggccagggtctgagcctgctaccagcggcagcgagacaccaggcacctctgagtccgccacaccagagtccggacccggatctcccgctgggagccccacctccactgaggagggatctcctgctggctctccaacatctactgaggaaggtacctcaaccgagccatccgagggatcagctcccggcacctcagagtcggcaaccccggagtctggacccggaacttccgaaagtgccacaccagagtccggtcccgggacttcagaatcagcaacacccgagtccggccctgggtctgaacccgccacaagtggtagtgagacaccaggatcagaacctgctacctcagggtcagagacacccggatctccggcaggctcaccaacctccactgaggagggcaccagcacagaaccaagcgagggctccgcacccggaacaagcactgaacccagtgagggttcagcacccggctctgagccggccacaagtggcagtgagacacccggcacttcagagagtgccacccccgagagtggcccaggcactagtaccgagccctctgaaggcagtgcgccagcctcgagcgaacaaaaactcatctcagaagaggatctgtcacctgcaaccggtcatcatcaccatcaccattga

SEQ ID NO: 1217 - protein, 2203 aa, synthetic construct
  REGION 1..2203: note = Description of Artificial Sequence: Synthetic polypeptide
ATRRYYLGAVELSWDYMQGAPTSESATPESGPGSEPATSGSETPGTSESATPESGPGSEPATSGSETPGTSESATPESGPGTSTEPSEGSAPGSPAGSPTSTEEGTSESATPESGPGSEPATSGSETPGTSESATPESGPGSPAGSPTSTEEGSPAGSPTSTEEGASSSDLGELPVDARFPPRVPKSFPFNTSVVYKKTLFVEFTDHLFNIAKPRPPWMGLLGPTIQAEVYDTVVITLKNMASHPVSLHAVGVSYWKASEGAEYDDQTSQREKEDDKVFPGGSHTYVWQVLKENGPMASDPLCLTYSYLSHVDLVKDLNSGLIGALLVCREGSLAKEKTQTLHKFILLFAVFDEGKSWHSETKNSLMQDRDAASARAWPKMHTVNGYVNRSLPGLIGCHRKSVYWHVIGMGTTPEVHSIFLEGHTFLVRNHRQASLEISPITFLTAQTLLMDLGQFLLFCHISSHQHDGMEAYVKVDSCPEEPQLRMKNNEEAEDYDDDLTDSEMDVVRFDDDNSPSFIQIRSVAKKHPKTWVHYIAAEEEDWDYAPLVLAPDDRSYKSGAPTSTEPSEGSAPGSPAGSPTSTEEGTSTEPSEGSAPGTSTEPSEGSAPGTSESATPESGPGTSTEPSEGSAPGTSESATPESGPGSEPATSGSETPGTSTEPSEGSAPGTSTEPSEGSAPGTSESATPESGPGTSESATPESGPGASSQYLNNGPQRIGRKYKKVRFMAYTDETFKTREAIQHESGILGPLLYGEVGDTLLIIFKNQASRPYNIYPHGITDVRPLYSRRLPKGVKHLKDFPILPGEIFKYKWTVTVEDGPTKSDPRCLTRYYSSFVNMERDLASGLIGPLLICYKESVDQRGNQIMSDKRNVILFSVFDENRSWYLTENIQRFLPNPAGVQLEDPEFQASNIMHSINGYVFDSLQLSVCLHEVAYWYILSIGAQTDFLSVFFSGYTFKHKMVYEDTLTLFPFSGETVFMSMENPGLWILGCHNSDFRNRGMTALLKVSSCDKNTGDYYEDSYEDISAYLLSKNNAIEPRSFSQNGAPSPAGSPTSTEEGTSESATPESGPGSEPATSGSETPGTSESATPESGPGTSTEPSEGSAPGTSTEPSEGSAPGTSTEPSEGSAPGTSTEPSEGSAPGTSTEPSEGSAPGTSTEPSEGSAPGSPAGSPTSTEEGTSTEPSEGSAPGASSPPVLKRHQAEITRTTLQSDQEEIDYDDTISVEMKKEDFDIYDEDENQSPRSFQKKTRHYFIAAVERLWDYGMSSSPHVLRNRAQSGSVPQFKKVVFQEFTDGSFTQPLYRGELNEHLGLLGPYIRAEVEDNIMVTFRNQASRPYSFYSSLISYEEDQRQGAEPRKNFVKPNETKTYFWKVQHHMAPTKDEFDCKAWAYFSDVDLEKDVHSGLIGPLLVCHTNTLNPAHGRQVTVQEFALFFTIFDETKSWYFTENMERNCRAPCNIQMEDPTFKENYRFHAINGYIMDTLPGLVMAQDQRIRWYLLSMGSNENIHSIHFSGHVFTVRKKEEYKMALYNLYPGVFETVEMLPSKAGIWRVECLIGEHLHAGMSTLFLVYSNKCQTPLGMASGHIRDFQITASGQYGQWAPKLARLHYSGSINAWSTKEPFSWIKVDLLAPMIIHGIKTQGARQKFSSLYISQFIIMYSLDGKKWQTYRGNSTGTLMVFFGNVDSSGIKHNIFNPPIIARYIRLHPTHYSIRSTLRMELMGCDLNSCSMPLGMESKAISDAQITASSYFTNMFATWSPSKARLHLQGRSNAWRPQVNNPKEWLQVDFQKTMKVTGVTTQGVKSLLTSMYVKEFLISSSQDGHQWTLFFQNGKVKVFQGNQDSFTPVVNSLDPPLLTRYLRIHPQSWVHQIALRMEVLGCEAQDLYGAPGTSESATPESGPGSEPATSGSETPGTSESATPESGPGSEPATSGSETPGTSESATPESGPGTSTEPSEGSAPGSPAGSPTSTEEGTSESATPESGPGSEPATSGSETPGTSESATPESGPGSPAGSPTSTEEGSPAGSPTSTEEGTSTEPSEGSAPGTSESATPESGPGTSESATPESGPGTSESATPESGPGSEPATSGSETPGSEPATSGSETPGSPAGSPTSTEEGTSTEPSEGSAPGTSTEPSEGSAPGSEPATSGSETPGTSESATPESGPGTSTEPSEGSAPASSEQKLISEEDLSPATGHHHHHH

SEQ ID NO: 1218 - DNA, 6612 bp, synthetic construct
  misc_feature 1..6612: note = Description of Artificial Sequence: Synthetic polynucleotide
  source 1..6612: mol_type = other DNA
gccaccagaagatactacctgggtgcagtggaactgtcatgggactatatgcaaggcgcgccaacatcagagagcgccacccctgaaagtggtcccgggagcgagccagccacatctgggtcggaaacgccaggcacaagtgagtctgcaactcccgagtccggacctggctccgagcctgccactagcggctccgagactccgggaacttccgagagcgctacaccagaaagcggacccggaaccagtaccgaacctagcgagggctctgctccgggcagcccagccggctctcctacatccacggaggagggcacttccgaatccgccaccccggagtcagggccaggatctgaacccgctacctcaggcagtgagacgccaggaacgagcgagtccgctacaccggagagtgggccagggagccctgctggatctcctacgtccactgaggaagggtcaccagcgggctcgcccaccagcactgaagaaggtgcctcgagcagtgatctcggtgagctgcctgtggacgcaagatttcctcctagagtgccaaaatcttttccattcaacacctcagtcgtgtacaaaaagactctgtttgtagaattcacggatcaccttttcaacatcgctaagccaaggccaccctggatgggtctgctaggtcctaccatccaggctgaggtttatgatacagtggtcattacacttaagaacatggcttcccatcctgtcagtcttcatgctgttggtgtatcctactggaaagcttctgagggagctgaatatgatgatcagaccagtcaaagggagaaagaagatgataaagtcttccctggtggaagccatacatatgtctggcaggtcctgaaagagaatggtccaatggcctctgacccactgtgccttacctactcatatctttctcatgtggacctggtaaaagacttgaattcaggcctcattggagccctactagtatgtagagaagggagtctggccaaggaaaagacacagaccttgcacaaatttatactactttttgctgtatttgatgaagggaaaagttggcactcagaaacaaagaactccttgatgcaggatagggatgctgcatctgctcgggcctggcctaaaatgcacacagtcaatggttatgtaaacaggtctctgccaggtctgattggatgccacaggaaatcagtctattggcatgtgattggaatgggcaccactcctgaagtgcactcaatattcctcgaaggtcacacatttcttgtgaggaaccatcgccaggctagcttggaaatctcgccaataactttccttactgctcaaacactcttgatggaccttggacagtttctactgttttgtcatatctcttcccaccaacatgatggcatggaagcttatgtcaaagtagacagctgtccagaggaaccccaactacgaatgaaaaataatgaagaagcggaagactatgatgatgatcttactgattctgaaatggatgtggtcaggtttgatgatgacaactctccttcctttatccaaattcgctcagttgccaagaagcatcctaaaacttgggtacattacattgctgctgaagaggaggactgggactatgctcccttagtcctcgcccccgatgacagaagttataaaagtggcgcgccaaccagtacggagccgtccgaggggagcgcaccaggaagcccggctgggagcccgacttctaccgaagagggtacatctaccgaaccaagtgaaggttcagcaccaggcacctcaacagaaccctctgagggctcggcgcctggtacaagtgagtccgccaccccagaatccgggcctgggacaagcacagaaccttcggaagggagtgcccctggaacatccgaatcggcaaccccagaatcagggccaggatctgagcccgcgacttcgggctccgagacgcctgggacatccaccgagccctccgaaggatcagccccaggcaccagcacggagccctctgagggaagcgcacctggtaccagcgaaagcgcaactcccgaatcaggtcccggtacgagcgagtcggcgaccccggagagcgggccaggtgcctcgagccaatatttgaacaatggccctcagcggattggtaggaagtacaaaaaagtccgatttatggcatacacagatgaaacctttaagactcgtgaagctattcagcatgaatcaggaatcttgggacctttactttatggggaagttggagacacactgttgattatatttaagaatcaagcaagcagaccatataacatctaccctcacggaatcactgatgtccgtcctttgtattcaaggagattaccaaaaggtgtaaaacatttgaaggattttccaattctgccaggagaaatattcaaatataaatggacagtgactgtagaagatgggccaactaaatcagatcctcggtgcctgacccgctattactctagtttcgttaatatggagagagatctagcttcaggactcattggccctctcctcatctgctacaaagaatctgtagatcaaagaggaaaccagataatgtcagacaagaggaatgtcatcctgttttctgtatttgatgagaaccgaagctggtacctcacagagaatatacaacgctttctccccaatccagctggagtgcagcttgaggatccagagttccaagcctccaacatcatgcacagcatcaatggctatgtttttgatagtttgcagttgtcagtttgtttgcatgaggtggcatactggtacattctaagcattggagcacagactgacttcctttctgtcttcttctctggatataccttcaaacacaaaatggtctatgaagacacactcaccctattcccattctcaggagaaactgtcttcatgtcgatggaaaacccaggtctatggattctggggtgccacaactcagactttcggaacagaggcatgaccgccttactgaaggtttctagttgtgacaagaacactggtgattattacgaggacagttatgaagatatttcagcatacttgctgagtaaaaacaatgccattgaaccaagaagcttctctcaaaacggcgcgccaagtcccgctggaagcccaactagcaccgaagaggggacctcagagtccgccacccccgagtccggccctggctctgagcctgccactagcggctccgagactcctggcacatccgaaagcgctacacccgagagtggacccggcacctctaccgagcccagtgagggctccgcccctggaacaagcaccgagcccagcgaaggcagcgccccagggacctccacagagcccagtgaaggcagtgctcctggcaccagcaccgaaccaagcgagggctctgcacccgggacctccaccgagccaagcgaaggctctgcccctggcacttccaccgagcccagcgaaggcagcgcccctgggagccccgctggctctcccaccagcactgaggagggcacatctaccgaaccaagtgaaggctctgcaccaggtgcctcgagcccaccagtcttgaaacgccatcaagctgaaataactcgtactactcttcagtcagatcaagaggaaatcgattatgatgataccatatcagttgaaatgaagaaggaagattttgacatttatgatgaggatgaaaatcagagcccccgcagctttcaaaagaaaacacgacactattttattgctgcagtggagaggctctgggattatgggatgagtagctccccacatgttctaagaaacagggctcagagtggcagtgtccctcagttcaagaaagttgttttccaggaatttactgatggctcctttactcagcccttataccgtggagaactaaatgaacatttgggactcctggggccatatataagagcagaagttgaagataatatcatggtaactttcagaaatcaggcctctcgtccctattccttctattctagccttatttcttatgaggaagatcagaggcaaggagcagaacctagaaaaaactttgtcaagcctaatgaaaccaaaacttacttttggaaagtgcaacatcatatggcacccactaaagatgagtttgactgcaaagcctgggcttatttctctgatgttgacctggaaaaagatgtgcactcaggcctgattggaccccttctggtctgccacactaacacactgaaccctgctcatgggagacaagtgacagtacaggaatttgctctgtttttcaccatctttgatgagaccaaaagctggtacttcactgaaaatatggaaagaaactgcagggctccctgcaatatccagatggaagatcccacttttaaagagaattatcgcttccatgcaatcaatggctacataatggatacactacctggcttagtaatggctcaggatcaaaggattcgatggtatctgctcagcatgggcagcaatgaaaacatccattctattcatttcagtggacatgtgttcactgtacgaaaaaaagaggagtataaaatggcactgtacaatctctatccaggtgtttttgagacagtggaaatgttaccatccaaagctggaatttggcgggtggaatgccttattggcgagcatctacatgctgggatgagcacactttttctggtgtacagcaataagtgtcagactcccctgggaatggcttctggacacattagagattttcagattacagcttcaggacaatatggacagtgggccccaaagctggccagacttcattattccggatcaatcaatgcctggagcaccaaggagcccttttcttggatcaaggtggatctgttggcaccaatgattattcacggcatcaagacccagggtgcccgtcagaagttctccagcctctacatctctcagtttatcatcatgtatagtcttgatgggaagaagtggcagacttatcgaggaaattccactggaaccttaatggtcttctttggcaatgtggattcatctgggataaaacacaatatttttaaccctccaattattgctcgatacatccgtttgcacccaactcattatagcattcgcagcactcttcgcatggagttgatgggctgtgatttaaatagttgcagcatgccattgggaatggagagtaaagcaatatcagatgcacagattactgcttcatcctactttaccaatatgtttgccacctggtctccttcaaaagctcgacttcacctccaagggaggagtaatgcctggagacctcaggtgaataatccaaaagagtggctgcaagtggacttccagaagacaatgaaagtcacaggagtaactactcagggagtaaaatctctgcttaccagcatgtatgtgaaggagttcctcatctccagcagtcaagatggccatcagtggactctcttttttcagaatggcaaagtaaaggtttttcagggaaatcaagactccttcacacctgtggtgaactctctagacccaccgttactgactcgctaccttcgaattcacccccagagttgggtgcaccagattgccctgaggatggaggttctgggctgcgaggcacaggacctctacggcgcgccaggtacctcagagtctgctacccccgagtcagggccaggatcagagccagccacctccgggtctgagacacccgggacttccgagagtgccacccctgagtccggacccgggtccgagcccgccacttccggctccgaaactcccggcacaagcgagagcgctaccccagagtcaggaccaggaacatctacagagccctctgaaggctccgctccagggtccccagccggcagtcccactagcaccgaggagggaacctctgaaagcgccacacccgaatcagggccagggtctgagcctgctaccagcggcagcgagacaccaggcacctctgagtccgccacaccagagtccggacccggatctcccgctgggagccccacctccactgaggagggatctcctgctggctctccaacatctactgaggaaggtacctcaaccgagccatccgagggatcagctcccggcacctcagagtcggcaaccccggagtctggacccggaacttccgaaagtgccacaccagagtccggtcccgggacttcagaatcagcaacacccgagtccggccctgggtctgaacccgccacaagtggtagtgagacaccaggatcagaacctgctacctcagggtcagagacacccggatctccggcaggctcaccaacctccactgaggagggcaccagcacagaaccaagcgagggctccgcacccggaacaagcactgaacccagtgagggttcagcacccggctctgagccggccacaagtggcagtgagacacccggcacttcagagagtgccacccccgagagtggcccaggcactagtaccgagccctctgaaggcagtgcgccagcctcgagcgaacaaaaactcatctcagaagaggatctgtcacctgcaaccggtcatcatcaccatcaccattga

SEQ ID NO: 1219 - protein, 2203 aa, synthetic construct
  REGION 1..2203: note = Description of Artificial Sequence: Synthetic polypeptide
ATRRYYLGAVELSWDYMQGAPGSSPSASTGTGPGSSPSASTGTGPGASPGTSSTGSPGASPGTSSTGSPGSSTPSGATGSPGSSPSASTGTGPGASPGTSSTGSPGSSPSASTGTGPGTPGSGTASSSPGSSTPSGATGSPGSSTPSGATGSPGASPGTSSTGSPASSSDLGELPVDARFPPRVPKSFPFNTSVVYKKTLFVEFTDHLFNIAKPRPPWMGLLGPTIQAEVYDTVVITLKNMASHPVSLHAVGVSYWKASEGAEYDDQTSQREKEDDKVFPGGSHTYVWQVLKENGPMASDPLCLTYSYLSHVDLVKDLNSGLIGALLVCREGSLAKEKTQTLHKFILLFAVFDEGKSWHSETKNSLMQDRDAASARAWPKMHTVNGYVNRSLPGLIGCHRKSVYWHVIGMGTTPEVHSIFLEGHTFLVRNHRQASLEISPITFLTAQTLLMDLGQFLLFCHISSHQHDGMEAYVKVDSCPEEPQLRMKNNEEAEDYDDDLTDSEMDVVRFDDDNSPSFIQIRSVAKKHPKTWVHYIAAEEEDWDYAPLVLAPDDRSYKSGAPTSTEPSEGSAPGSPAGSPTSTEEGTSTEPSEGSAPGTSTEPSEGSAPGTSESATPESGPGTSTEPSEGSAPGTSESATPESGPGSEPATSGSETPGTSTEPSEGSAPGTSTEPSEGSAPGTSESATPESGPGTSESATPESGPGASSQYLNNGPQRIGRKYKKVRFMAYTDETFKTREAIQHESGILGPLLYGEVGDTLLIIFKNQASRPYNIYPHGITDVRPLYSRRLPKGVKHLKDFPILPGEIFKYKWTVTVEDGPTKSDPRCLTRYYSSFVNMERDLASGLIGPLLICYKESVDQRGNQIMSDKRNVILFSVFDENRSWYLTENIQRFLPNPAGVQLEDPEFQASNIMHSINGYVFDSLQLSVCLHEVAYWYILSIGAQTDFLSVFFSGYTFKHKMVYEDTLTLFPFSGETVFMSMENPGLWILGCHNSDFRNRGMTALLKVSSCDKNTGDYYEDSYEDISAYLLSKNNAIEPRSFSQNGAPSPAGSPTSTEEGTSESATPESGPGSEPATSGSETPGTSESATPESGPGTSTEPSEGSAPGTSTEPSEGSAPGTSTEPSEGSAPGTSTEPSEGSAPGTSTEPSEGSAPGTSTEPSEGSAPGSPAGSPTSTEEGTSTEPSEGSAPGASSPPVLKRHQAEITRTTLQSDQEEIDYDDTISVEMKKEDFDIYDEDENQSPRSFQKKTRHYFIAAVERLWDYGMSSSPHVLRNRAQSGSVPQFKKVVFQEFTDGSFTQPLYRGELNEHLGLLGPYIRAEVEDNIMVTFRNQASRPYSFYSSLISYEEDQRQGAEPRKNFVKPNETKTYFWKVQHHMAPTKDEFDCKAWAYFSDVDLEKDVHSGLIGPLLVCHTNTLNPAHGRQVTVQEFALFFTIFDETKSWYFTENMERNCRAPCNIQMEDPTFKENYRFHAINGYIMDTLPGLVMAQDQRIRWYLLSMGSNENIHSIHFSGHVFTVRKKEEYKMALYNLYPGVFETVEMLPSKAGIWRVECLIGEHLHAGMSTLFLVYSNKCQTPLGMASGHIRDFQITASGQYGQWAPKLARLHYSGSINAWSTKEPFSWIKVDLLAPMIIHGIKTQGARQKFSSLYISQFIIMYSLDGKKWQTYRGNSTGTLMVFFGNVDSSGIKHNIFNPPIIARYIRLHPTHYSIRSTLRMELMGCDLNSCSMPLGMESKAISDAQITASSYFTNMFATWSPSKARLHLQGRSNAWRPQVNNPKEWLQVDFQKTMKVTGVTTQGVKSLLTSMYVKEFLISSSQDGHQWTLFFQNGKVKVFQGNQDSFTPVVNSLDPPLLTRYLRIHPQSWVHQIALRMEVLGCEAQDLYGAPGTSESATPESGPGSEPATSGSETPGTSESATPESGPGSEPATSGSETPGTSESATPESGPGTSTEPSEGSAPGSPAGSPTSTEEGTSESATPESGPGSEPATSGSETPGTSESATPESGPGSPAGSPTSTEEGSPAGSPTSTEEGTSTEPSEGSAPGTSESATPESGPGTSESATPESGPGTSESATPESGPGSEPATSGSETPGSEPATSGSETPGSPAGSPTSTEEGTSTEPSEGSAPGTSTEPSEGSAPGSEPATSGSETPGTSESATPESGPGTSTEPSEGSAPASSEQKLISEEDLSPATGHHHHHH

SEQ ID NO: 1220 - DNA, 6612 bp, synthetic construct
  misc_feature 1..6612: note = Description of Artificial Sequence: Synthetic polynucleotide
  source 1..6612: mol_type = other DNA
gccaccagaagatactacctgggtgcagtggaactgtcatgggactatatgcaaggcgcgccaggctccagcccctccgcgagcacgggaaccggaccaggttcgtcaccctcagcatcaacggggacgggaccgggggcgtcaccaggaacgtcctccaccggctcgccgggtgcatcacccggaacgtcatcgaccggatcgccagggagctcgacgccatcaggcgcaacaggatcacctggctcaagccctagcgcgtcaaccggcacgggtccgggtgcctcccctggcacgtccagcaccggatcacccggatcgagcccatccgcctcaaccggaaccggacccggtacaccagggtcgggaacagcctcctcgtcaccaggctcctcaaccccctcgggagccacgggttcgcccggttcgtcaacgccttccggagcaactggtagccccggagcatcgccaggaacttcgagcacggggtcgcccgcctcgagcagtgatctcggtgagctgcctgtggacgcaagatttcctcctagagtgccaaaatcttttccattcaacacctcagtcgtgtacaaaaagactctgtttgtagaattcacggatcaccttttcaacatcgctaagccaaggccaccctggatgggtctgctaggtcctaccatccaggctgaggtttatgatacagtggtcattacacttaagaacatggcttcccatcctgtcagtcttcatgctgttggtgtatcctactggaaagcttctgagggagctgaatatgatgatcagaccagtcaaagggagaaagaagatgataaagtcttccctggtggaagccatacatatgtctggcaggtcctgaaagagaatggtccaatggcctctgacccactgtgccttacctactcatatctttctcatgtggacctggtaaaagacttgaattcaggcctcattggagccctactagtatgtagagaagggagtctggccaaggaaaagacacagaccttgcacaaatttatactactttttgctgtatttgatgaagggaaaagttggcactcagaaacaaagaactccttgatgcaggatagggatgctgcatctgctcgggcctggcctaaaatgcacacagtcaatggttatgtaaacaggtctctgccaggtctgattggatgccacaggaaatcagtctattggcatgtgattggaatgggcaccactcctgaagtgcactcaatattcctcgaaggtcacacatttcttgtgaggaaccatcgccaggctagcttggaaatctcgccaataactttccttactgctcaaacactcttgatggaccttggacagtttctactgttttgtcatatctcttcccaccaacatgatggcatggaagcttatgtcaaagtagacagctgtccagaggaaccccaactacgaatgaaaaataatgaagaagcggaagactatgatgatgatcttactgattctgaaatggatgtggtcaggtttgatgatgacaactctccttcctttatccaaattcgctcagttgccaagaagcatcctaaaacttgggtacattacattgctgctgaagaggaggactgggactatgctcccttagtcctcgcccccgatgacagaagttataaaagtggcgcgccaaccagtacggagccgtccgaggggagcgcaccaggaagcccggctgggagcccgacttctaccgaagagggtacatctaccgaaccaagtgaaggttcagcaccaggcacctcaacagaaccctctgagggctcggcgcctggtacaagtgagtccgccaccccagaatccgggcctgggacaagcacagaaccttcggaagggagtgcccctggaacatccgaatcggcaaccccagaatcagggccaggatctgagcccgcgacttcgggctccgagacgcctgggacatccaccgagccctccgaaggatcagccccaggcaccagcacggagccctctgagggaagcgcacctggtaccagcgaaagcgcaactcccgaatcaggtcccggtacgagcgagtcggcgaccccggagagcgggccaggtgcctcgagccaatatttgaacaatggccctcagcggattggtaggaagtacaaaaaagtccgatttatggcatacacagatgaaacctttaagactcgtgaagctattcagcatgaatcaggaatcttgggacctttactttatggggaagttggagacacactgttgattatatttaagaatcaagcaagcagaccatataacatctaccctcacggaatcactgatgtccgtcctttgtattcaaggagattaccaaaaggtgtaaaacatttgaaggattttccaattctgccaggagaaatattcaaatataaatggacagtgactgtagaagatgggccaactaaatcagatcctcggtgcctgacccgctattactctagtttcgttaatatggagagagatctagcttcaggactcattggccctctcctcatctgctacaaagaatctgtagatcaaagaggaaaccagataatgtcagacaagaggaatgtcatcctgttttctgtatttgatgagaaccgaagctggtacctcacagagaatatacaacgctttctccccaatccagctggagtgcagcttgaggatccagagttccaagcctccaacatcatgcacagcatcaatggctatgtttttgatagtttgcagttgtcagtttgtttgcatgaggtggcatactggtacattctaagcattggagcacagactgacttcctttctgtcttcttctctggatataccttcaaacacaaaatggtctatgaagacacactcaccctattcccattctcaggagaaactgtcttcatgtcgatggaaaacccaggtctatggattctggggtgccacaactcagactttcggaacagaggcatgaccgccttactgaaggtttctagttgtgacaagaacactggtgattattacgaggacagttatgaagatatttcagcatacttgctgagtaaaaacaatgccattgaaccaagaagcttctctcaaaacggcgcgccaagtcccgctggaagcccaactagcaccgaagaggggacctcagagtccgccacccccgagtccggccctggctctgagcctgccactagcggctccgagactcctggcacatccgaaagcgctacacccgagagtggacccggcacctctaccgagcccagtgagggctccgcccctggaacaagcaccgagcccagcgaaggcagcgccccagggacctccacagagcccagtgaaggcagtgctcctggcaccagcaccgaaccaagcgagggctctgcacccgggacctccaccgagccaagcgaaggctctgcccctggcacttccaccgagcccagcgaaggcagcgcccctgggagccccgctggctctcccaccagcactgaggagggcacatctaccgaaccaagtgaaggctctgcaccaggtgcctcgagcccaccagtcttgaaacgccatcaagctgaaataactcgtactactcttcagtcagatcaagaggaaatcgattatgatgataccatatcagttgaaatgaagaaggaagattttgacatttatgatgaggatgaaaatcagagcccccgcagctttcaaaagaaaacacgacactattttattgctgcagtggagaggctctgggattatgggatgagtagctccccacatgttctaagaaacagggctcagagtggcagtgtccctcagttcaagaaagttgttttccaggaatttactgatggctcctttactcagcccttataccgtggagaactaaatgaacatttgggactcctggggccatatataagagcagaagttgaagataatatcatggtaactttcagaaatcaggcctctcgtccctattccttctattctagccttatttcttatgaggaagatcagaggcaaggagcagaacctagaaaaaactttgtcaagcctaatgaaaccaaaacttacttttggaaagtgcaacatcatatggcacccactaaagatgagtttgactgcaaagcctgggcttatttctctgatgttgacctggaaaaagatgtgcactcaggcctgattggaccccttctggtctgccacactaacacactgaaccctgctcatgggagacaagtgacagtacaggaatttgctctgtttttcaccatctttgatgagaccaaaagctggtacttcactgaaaatatggaaagaaactgcagggctccctgcaatatccagatggaagatcccacttttaaagagaattatcgcttccatgcaatcaatggctacataatggatacactacctggcttagtaatggctcaggatcaaaggattcgatggtatctgctcagcatgggcagcaatgaaaacatccattctattcatttcagtggacatgtgttcactgtacgaaaaaaagaggagtataaaatggcactgtacaatctctatccaggtgtttttgagacagtggaaatgttaccatccaaagctggaatttggcgggtggaatgccttattggcgagcatctacatgctgggatgagcacactttttctggtgtacagcaataagtgtcagactcccctgggaatggcttctggacacattagagattttcagattacagcttcaggacaatatggacagtgggccccaaagctggccagacttcattattccggatcaatcaatgcctggagcaccaaggagcccttttcttggatcaaggtggatctgttggcaccaatgattattcacggcatcaagacccagggtgcccgtcagaagttctccagcctctacatctctcagtttatcatcatgtatagtcttgatgggaagaagtggcagacttatcgaggaaattccactggaaccttaatggtcttctttggcaatgtggattcatctgggataaaacacaatatttttaaccctccaattattgctcgatacatccgtttgcacccaactcattatagcattcgcagcactcttcgcatggagttgatgggctgtgatttaaatagttgcagcatgccattgggaatggagagtaaagcaatatcagatgcacagattactgcttcatcctactttaccaatatgtttgccacctggtctccttcaaaagctcgacttcacctccaagggaggagtaatgcctggagacctcaggtgaataatccaaaagagtggctgcaagtggacttccagaagacaatgaaagtcacaggagtaactactcagggagtaaaatctctgcttaccagcatgtatgtgaaggagttcctcatctccagcagtcaagatggccatcagtggactctcttttttcagaatggcaaagtaaaggtttttcagggaaatcaagactccttcacacctgtggtgaactctctagacccaccgttactgactcgctaccttcgaattcacccccagagttgggtgcaccagattgccctgaggatggaggttctgggctgcgaggcacaggacctctacggcgcgccaggtacctcagagtctgctacccccgagtcagggccaggatcagagccagccacctccgggtctgagacacccgggacttccgagagtgccacccctgagtccggacccgggtccgagcccgccacttccggctccgaaactcccggcacaagcgagagcgctaccccagagtcaggaccaggaacatctacagagccctctgaaggctccgctccagggtccccagccggcagtcccactagcaccgaggagggaacctctgaaagcgccacacccgaatcagggccagggtctgagcctgctaccagcggcagcgagacaccaggcacctctgagtccgccacaccagagtccggacccggatctcccgctgggagccccacctccactgaggagggatctcctgctggctctccaacatctactgaggaaggtacctcaaccgagccatccgagggatcagctcccggcacctcagagtcggcaaccccggagtctggacccggaacttccgaaagtgccacaccagagtccggtcccgggacttcagaatcagcaacacccgagtccggccctgggtctgaacccgccacaagtggtagtgagacaccaggatcagaacctgctacctcagggtcagagacacccggatctccggcaggctcaccaacctccactgaggagggcaccagcacagaaccaagcgagggctccgcacccggaacaagcactgaacccagtgagggttcagcacccggctctgagccggccacaagtggcagtgagacacccggcacttcagagagtgccacccccgagagtggcccaggcactagtaccgagccctctgaaggcagtgcgccagcctcgagcgaacaaaaactcatctcagaagaggatctgtcacctgcaaccggtcatcatcaccatcaccattga

SEQ ID NO: 1221 - protein, 2203 aa, synthetic construct
  REGION 1..2203: note = Description of Artificial Sequence: Synthetic polypeptide
ATRRYYLGAVELSWDYMQSDLGELPVGAPGSSPSASTGTGPGSSPSASTGTGPGASPGTSSTGSPGASPGTSSTGSPGSSTPSGATGSPGSSPSASTGTGPGASPGTSSTGSPGSSPSASTGTGPGTPGSGTASSSPGSSTPSGATGSPGSSTPSGATGSPGASPGTSSTGSPASSDARFPPRVPKSFPFNTSVVYKKTLFVEFTDHLFNIAKPRPPWMGLLGPTIQAEVYDTVVITLKNMASHPVSLHAVGVSYWKASEGAEYDDQTSQREKEDDKVFPGGSHTYVWQVLKENGPMASDPLCLTYSYLSHVDLVKDLNSGLIGALLVCREGSLAKEKTQTLHKFILLFAVFDEGKSWHSETKNSLMQDRDAASARAWPKMHTVNGYVNRSLPGLIGCHRKSVYWHVIGMGTTPEVHSIFLEGHTFLVRNHRQASLEISPITFLTAQTLLMDLGQFLLFCHISSHQHDGMEAYVKVDSCPEEPQLRMKNNEEAEDYDDDLTDSEMDVVRFDDDNSPSFIQIRSVAKKHPKTWVHYIAAEEEDWDYAPLVLAPDDRSYKSGAPTSTEPSEGSAPGSPAGSPTSTEEGTSTEPSEGSAPGTSTEPSEGSAPGTSESATPESGPGTSTEPSEGSAPGTSESATPESGPGSEPATSGSETPGTSTEPSEGSAPGTSTEPSEGSAPGTSESATPESGPGTSESATPESGPGASSQYLNNGPQRIGRKYKKVRFMAYTDETFKTREAIQHESGILGPLLYGEVGDTLLIIFKNQASRPYNIYPHGITDVRPLYSRRLPKGVKHLKDFPILPGEIFKYKWTVTVEDGPTKSDPRCLTRYYSSFVNMERDLASGLIGPLLICYKESVDQRGNQIMSDKRNVILFSVFDENRSWYLTENIQRFLPNPAGVQLEDPEFQASNIMHSINGYVFDSLQLSVCLHEVAYWYILSIGAQTDFLSVFFSGYTFKHKMVYEDTLTLFPFSGETVFMSMENPGLWILGCHNSDFRNRGMTALLKVSSCDKNTGDYYEDSYEDISAYLLSKNNAIEPRSFSQNGAPSPAGSPTSTEEGTSESATPESGPGSEPATSGSETPGTSESATPESGPGTSTEPSEGSAPGTSTEPSEGSAPGTSTEPSEGSAPGTSTEPSEGSAPGTSTEPSEGSAPGTSTEPSEGSAPGSPAGSPTSTEEGTSTEPSEGSAPGASSPPVLKRHQAEITRTTLQSDQEEIDYDDTISVEMKKEDFDIYDEDENQSPRSFQKKTRHYFIAAVERLWDYGMSSSPHVLRNRAQSGSVPQFKKVVFQEFTDGSFTQPLYRGELNEHLGLLGPYIRAEVEDNIMVTFRNQASRPYSFYSSLISYEEDQRQGAEPRKNFVKPNETKTYFWKVQHHMAPTKDEFDCKAWAYFSDVDLEKDVHSGLIGPLLVCHTNTLNPAHGRQVTVQEFALFFTIFDETKSWYFTENMERNCRAPCNIQMEDPTFKENYRFHAINGYIMDTLPGLVMAQDQRIRWYLLSMGSNENIHSIHFSGHVFTVRKKEEYKMALYNLYPGVFETVEMLPSKAGIWRVECLIGEHLHAGMSTLFLVYSNKCQTPLGMASGHIRDFQITASGQYGQWAPKLARLHYSGSINAWSTKEPFSWIKVDLLAPMIIHGIKTQGARQKFSSLYISQFIIMYSLDGKKWQTYRGNSTGTLMVFFGNVDSSGIKHNIFNPPIIARYIRLHPTHYSIRSTLRMELMGCDLNSCSMPLGMESKAISDAQITASSYFTNMFATWSPSKARLHLQGRSNAWRPQVNNPKEWLQVDFQKTMKVTGVTTQGVKSLLTSMYVKEFLISSSQDGHQWTLFFQNGKVKVFQGNQDSFTPVVNSLDPPLLTRYLRIHPQSWVHQIALRMEVLGCEAQDLYGAPGTSESATPESGPGSEPATSGSETPGTSESATPESGPGSEPATSGSETPGTSESATPESGPGTSTEPSEGSAPGSPAGSPTSTEEGTSESATPESGPGSEPATSGSETPGTSESATPESGPGSPAGSPTSTEEGSPAGSPTSTEEGTSTEPSEGSAPGTSESATPESGPGTSESATPESGPGTSESATPESGPGSEPATSGSETPGSEPATSGSETPGSPAGSPTSTEEGTSTEPSEGSAPGTSTEPSEGSAPGSEPATSGSETPGTSESATPESGPGTSTEPSEGSAPASSEQKLISEEDLSPATGHHHHHH

SEQ ID NO: 1222 - DNA, 6612 bp, synthetic construct
  misc_feature 1..6612: note = Description of Artificial Sequence: Synthetic polynucleotide
  source 1..6612: mol_type = other DNA
gccaccagaagatactacctgggtgcagtggaactgtcatgggactatatgcaaagtgatctcggtgagctgcctgtgggcgcgccaggctccagcccctccgcgagcacgggaaccggaccaggttcgtcaccctcagcatcaacggggacgggaccgggggcgtcaccaggaacgtcctccaccggctcgccgggtgcatcacccggaacgtcatcgaccggatcgccagggagctcgacgccatcaggcgcaacaggatcacctggctcaagccctagcgcgtcaaccggcacgggtccgggtgcctcccctggcacgtccagcaccggatcacccggatcgagcccatccgcctcaaccggaaccggacccggtacaccagggtcgggaacagcctcctcgtcaccaggctcctcaaccccctcgggagccacgggttcgcccggttcgtcaacgccttccggagcaactggtagccccggagcatcgccaggaacttcgagcacggggtcgcccgcctcgagcgacgcaagatttcctcctagagtgccaaaatcttttccattcaacacctcagtcgtgtacaaaaagactctgtttgtagaattcacggatcaccttttcaacatcgctaagccaaggccaccctggatgggtctgctaggtcctaccatccaggctgaggtttatgatacagtggtcattacacttaagaacatggcttcccatcctgtcagtcttcatgctgttggtgtatcctactggaaagcttctgagggagctgaatatgatgatcagaccagtcaaagggagaaagaagatgataaagtcttccctggtggaagccatacatatgtctggcaggtcctgaaagagaatggtccaatggcctctgacccactgtgccttacctactcatatctttctcatgtggacctggtaaaagacttgaattcaggcctcattggagccctactagtatgtagagaagggagtctggccaaggaaaagacacagaccttgcacaaatttatactactttttgctgtatttgatgaagggaaaagttggcactcagaaacaaagaactccttgatgcaggatagggatgctgcatctgctcgggcctggcctaaaatgcacacagtcaatggttatgtaaacaggtctctgccaggtctgattggatgccacaggaaatcagtctattggcatgtgattggaatgggcaccactcctgaagtgcactcaatattcctcgaaggtcacacatttcttgtgaggaaccatcgccaggctagcttggaaatctcgccaataactttccttactgctcaaacactcttgatggaccttggacagtttctactgttttgtcatatctcttcccaccaacatgatggcatggaagcttatgtcaaagtagacagctgtccagaggaaccccaactacgaatgaaaaataatgaagaagcggaagactatgatgatgatcttactgattctgaaatggatgtggtcaggtttgatgatgacaactctccttcctttatccaaattcgctcagttgccaagaagcatcctaaaacttgggtacattacattgctgctgaagaggaggactgggactatgctcccttagtcctcgcccccgatgacagaagttataaaagtggcgcgccaaccagtacggagccgtccgaggggagcgcaccaggaagcccggctgggagcccgacttctaccgaagagggtacatctaccgaaccaagtgaaggttcagcaccaggcacctcaacagaaccctctgagggctcggcgcctggtacaagtgagtccgccaccccagaatccgggcctgggacaagcacagaaccttcggaagggagtgcccctggaacatccgaatcggcaaccccagaatcagggccaggatctgagcccgcgacttcgggctccgagacgcctgggacatccaccgagccctccgaaggatcagccccaggcaccagcacggagccctctgagggaagcgcacctggtaccagcgaaagcgcaactcccgaatcaggtcccggtacgagcgagtcggcgaccccggagagcgggccaggtgcctcgagccaatatttgaacaatggccctcagcggattggtaggaagtacaaaaaagtccgatttatggcatacacagatgaaacctttaagactcgtgaagctattcagcatgaatcaggaatcttgggacctttactttatggggaagttggagacacactgttgattatatttaagaatcaagcaagcagaccatataacatctaccctcacggaatcactgatgtccgtcctttgtattcaaggagattaccaaaaggtgtaaaacatttgaaggattttccaattctgccaggagaaatattcaaatataaatggacagtgactgtagaagatgggccaactaaatcagatcctcggtgcctgacccgctattactctagtttcgttaatatggagagagatctagcttcaggactcattggccctctcctcatctgctacaaagaatctgtagatcaaagaggaaaccagataatgtcagacaagaggaatgtcatcctgttttctgtatttgatgagaaccgaagctggtacctcacagagaatatacaacgctttctccccaatccagctggagtgcagcttgaggatccagagttccaagcctccaacatcatgcacagcatcaatggctatgtttttgatagtttgcagttgtcagtttgtttgcatgaggtggcatactggtacattctaagcattggagcacagactgacttcctttctgtcttcttctctggatataccttcaaacacaaaatggtctatgaagacacactcaccctattcccattctcaggagaaactgtcttcatgtcgatggaaaacccaggtctatggattctggggtgccacaactcagactttcggaacagaggcatgaccgccttactgaaggtttctagttgtgacaagaacactggtgattattacgaggacagttatgaagatatttcagcatacttgctgagtaaaaacaatgccattgaaccaagaagcttctctcaaaacggcgcgccaagtcccgctggaagcccaactagcaccgaagaggggacctcagagtccgccacccccgagtccggccctggctctgagcctgccactagcggctccgagactcctggcacatccgaaagcgctacacccgagagtggacccggcacctctaccgagcccagtgagggctccgcccctggaacaagcaccgagcccagcgaaggcagcgccccagggacctccacagagcccagtgaaggcagtgctcctggcaccagcaccgaaccaagcgagggctctgcacccgggacctccaccgagccaagcgaaggctctgcccctggcacttccaccgagcccagcgaaggcagcgcccctgggagccccgctggctctcccaccagcactgaggagggcacatctaccgaaccaagtgaaggctctgcaccaggtgcctcgagcccaccagtcttgaaacgccatcaagctgaaataactcgtactactcttcagtcagatcaagaggaaatcgattatgatgataccatatcagttgaaatgaagaaggaagattttgacatttatgatgaggatgaaaatcagagcccccgcagctttcaaaagaaaacacgacactattttattgctgcagtggagaggctctgggattatgggatgagtagctccccacatgttctaagaaacagggctcagagtggcagtgtccctcagttcaagaaagttgttttccaggaatttactgatggctcctttactcagcccttataccgtggagaactaaatgaacatttgggactcctggggccatatataagagcagaagttgaagataatatcatggtaactttcagaaatcaggcctctcgtccctattccttctattctagccttatttcttatgaggaagatcagaggcaaggagcagaacctagaaaaaactttgtcaagcctaatgaaaccaaaacttacttttggaaagtgcaacatcatatggcacccactaaagatgagtttgactgcaaagcctgggcttatttctctgatgttgacctggaaaaagatgtgcactcaggcctgattggaccccttctggtctgccacactaacacactgaaccctgctcatgggagacaagtgacagtacaggaatttgctctgtttttcaccatctttgatgagaccaaaagctggtacttcactgaaaatatggaaagaaactgcagggctccctgcaatatccagatggaagatcccacttttaaagagaattatcgcttccatgcaatcaatggctacataatggatacactacctggcttagtaatggctcaggatcaaaggattcgatggtatctgctcagcatgggcagcaatgaaaacatccattctattcatttcagtggacatgtgttcactgtacgaaaaaaagaggagtataaaatggcactgtacaatctctatccaggtgtttttgagacagtggaaatgttaccatccaaagctggaatttggcgggtggaatgccttattggcgagcatctacatgctgggatgagcacactttttctggtgtacagcaataagtgtcagactcccctgggaatggcttctggacacattagagattttcagattacagcttcaggacaatatggacagtgggccccaaagctggccagacttcattattccggatcaatcaatgcctggagcaccaaggagcccttttcttggatcaaggtggatctgttggcaccaatgattattcacggcatcaagacccagggtgcccgtcagaagttctccagcctctacatctctcagtttatcatcatgtatagtcttgatgggaagaagtggcagacttatcgaggaaattccactggaaccttaatggtcttctttggcaatgtggattcatctgggataaaacacaatatttttaaccctccaattattgctcgatacatccgtttgcacccaactcattatagcattcgcagcactcttcgcatggagttgatgggctgtgatttaaatagttgcagcatgccattgggaatggagagtaaagcaatatcagatgcacagattactgcttcatcctactttaccaatatgtttgccacctggtctccttcaaaagctcgacttcacctccaagggaggagtaatgcctggagacctcaggtgaataatccaaaagagtggctgcaagtggacttccagaagacaatgaaagtcacaggagtaactactcagggagtaaaatctctgcttaccagcatgtatgtgaaggagttcctcatctccagcagtcaagatggccatcagtggactctcttttttcagaatggcaaagtaaaggtttttcagggaaatcaagactccttcacacctgtggtgaactctctagacccaccgttactgactcgctaccttcgaattcacccccagagttgggtgcaccagattgccctgaggatggaggttctgggctgcgaggcacaggacctctacggcgcgccaggtacctcagagtctgctacccccgagtcagggccaggatcagagccagccacctccgggtctgagacacccgggacttccgagagtgccacccctgagtccggacccgggtccgagcccgccacttccggctccgaaactcccggcacaagcgagagcgctaccccagagtcaggaccaggaacatctacagagccctctgaaggctccgctccagggtccccagccggcagtcccactagcaccgaggagggaacctctgaaagcgccacacccgaatcagggccagggtctgagcctgctaccagcggcagcgagacaccaggcacctctgagtccgccacaccagagtccggacccggatctcccgctgggagccccacctccactgaggagggatctcctgctggctctccaacatctactgaggaaggtacctcaaccgagccatccgagggatcagctcccggcacctcagagtcggcaaccccggagtctggacccggaacttccgaaagtgccacaccagagtccggtcccgggacttcagaatcagcaacacccgagtccggccctgggtctgaacccgccacaagtggtagtgagacaccaggatcagaacctgctacctcagggtcagagacacccggatctccggcaggctcaccaacctccactgaggagggcaccagcacagaaccaagcgagggctccgcacccggaacaagcactgaacccagtgagggttcagcacccggctctgagccggccacaagtggcagtgagacacccggcacttcagagagtgccacccccgagagtggcccaggcactagtaccgagccctctgaaggcagtgcgccagcctcgagcgaacaaaaactcatctcagaagaggatctgtcacctgcaaccggtcatcatcaccatcaccattga

SEQ ID NO: 1223 - protein, 2203 aa, synthetic construct
  REGION 1..2203: note = Description of Artificial Sequence: Synthetic polypeptide
ATRRYYLGAVELSWDYMQSDLGELPVDARFPPRVPKSFPFGAPGSSPSASTGTGPGSSPSASTGTGPGASPGTSSTGSPGASPGTSSTGSPGSSTPSGATGSPGSSPSASTGTGPGASPGTSSTGSPGSSPSASTGTGPGTPGSGTASSSPGSSTPSGATGSPGSSTPSGATGSPGASPGTSSTGSPASSNTSVVYKKTLFVEFTDHLFNIAKPRPPWMGLLGPTIQAEVYDTVVITLKNMASHPVSLHAVGVSYWKASEGAEYDDQTSQREKEDDKVFPGGSHTYVWQVLKENGPMASDPLCLTYSYLSHVDLVKDLNSGLIGALLVCREGSLAKEKTQTLHKFILLFAVFDEGKSWHSETKNSLMQDRDAASARAWPKMHTVNGYVNRSLPGLIGCHRKSVYWHVIGMGTTPEVHSIFLEGHTFLVRNHRQASLEISPITFLTAQTLLMDLGQFLLFCHISSHQHDGMEAYVKVDSCPEEPQLRMKNNEEAEDYDDDLTDSEMDVVRFDDDNSPSFIQIRSVAKKHPKTWVHYIAAEEEDWDYAPLVLAPDDRSYKSGAPTSTEPSEGSAPGSPAGSPTSTEEGTSTEPSEGSAPGTSTEPSEGSAPGTSESATPESGPGTSTEPSEGSAPGTSESATPESGPGSEPATSGSETPGTSTEPSEGSAPGTSTEPSEGSAPGTSESATPESGPGTSESATPESGPGASSQYLNNGPQRIGRKYKKVRFMAYTDETFKTREAIQHESGILGPLLYGEVGDTLLIIFKNQASRPYNIYPHGITDVRPLYSRRLPKGVKHLKDFPILPGEIFKYKWTVTVEDGPTKSDPRCLTRYYSSFVNMERDLASGLIGPLLICYKESVDQRGNQIMSDKRNVILFSVFDENRSWYLTENIQRFLPNPAGVQLEDPEFQASNIMHSINGYVFDSLQLSVCLHEVAYWYILSIGAQTDFLSVFFSGYTFKHKMVYEDTLTLFPFSGETVFMSMENPGLWILGCHNSDFRNRGMTALLKVSSCDKNTGDYYEDSYEDISAYLLSKNNAIEPRSFSQNGAPSPAGSPTSTEEGTSESATPESGPGSEPATSGSETPGTSESATPESGPGTSTEPSEGSAPGTSTEPSEGSAPGTSTEPSEGSAPGTSTEPSEGSAPGTSTEPSEGSAPGTSTEPSEGSAPGSPAGSPTSTEEGTSTEPSEGSAPGASSPPVLKRHQAEITRTTLQSDQEEIDYDDTISVEMKKEDFDIYDEDENQSPRSFQKKTRHYFIAAVERLWDYGMSSSPHVLRNRAQSGSVPQFKKVVFQEFTDGSFTQPLYRGELNEHLGLLGPYIRAEVEDNIMVTFRNQASRPYSFYSSLISYEEDQRQGAEPRKNFVKPNETKTYFWKVQHHMAPTKDEFDCKAWAYFSDVDLEKDVHSGLIGPLLVCHTNTLNPAHGRQVTVQEFALFFTIFDETKSWYFTENMERNCRAPCNIQMEDPTFKENYRFHAINGYIMDTLPGLVMAQDQRIRWYLLSMGSNENIHSIHFSGHVFTVRKKEEYKMALYNLYPGVFETVEMLPSKAGIWRVECLIGEHLHAGMSTLFLVYSNKCQTPLGMASGHIRDFQITASGQYGQWAPKLARLHYSGSINAWSTKEPFSWIKVDLLAPMIIHGIKTQGARQKFSSLYISQFIIMYSLDGKKWQTYRGNSTGTLMVFFGNVDSSGIKHNIFNPPIIARYIRLHPTHYSIRSTLRMELMGCDLNSCSMPLGMESKAISDAQITASSYFTNMFATWSPSKARLHLQGRSNAWRPQVNNPKEWLQVDFQKTMKVTGVTTQGVKSLLTSMYVKEFLISSSQDGHQWTLFFQNGKVKVFQGNQDSFTPVVNSLDPPLLTRYLRIHPQSWVHQIALRMEVLGCEAQDLYGAPGTSESATPESGPGSEPATSGSETPGTSESATPESGPGSEPATSGSETPGTSESATPESGPGTSTEPSEGSAPGSPAGSPTSTEEGTSESATPESGPGSEPATSGSETPGTSESATPESGPGSPAGSPTSTEEGSPAGSPTSTEEGTSTEPSEGSAPGTSESATPESGPGTSESATPESGPGTSESATPESGPGSEPATSGSETPGSEPATSGSETPGSPAGSPTSTEEGTSTEPSEGSAPGTSTEPSEGSAPGSEPATSGSETPGTSESATPESGPGTSTEPSEGSAPASSEQKLISEEDLSPATGHHHHHH

SEQ ID NO: 1224 - DNA, 6612 bp, synthetic construct
  misc_feature 1..6612: note = Description of Artificial Sequence: Synthetic polynucleotide
  source 1..6612: mol_type = other DNA
gccaccagaagatactacctgggtgcagtggaactgtcatgggactatatgcaaagtgatctcggtgagctgcctgtggacgcaagatttcctcctagagtgccaaaatcttttccattcggcgcgccaggctccagcccctccgcgagcacgggaaccggaccaggttcgtcaccctcagcatcaacggggacgggaccgggggcgtcaccaggaacgtcctccaccggctcgccgggtgcatcacccggaacgtcatcgaccggatcgccagggagctcgacgccatcaggcgcaacaggatcacctggctcaagccctagcgcgtcaaccggcacgggtccgggtgcctcccctggcacgtccagcaccggatcacccggatcgagcccatccgcctcaaccggaaccggacccggtacaccagggtcgggaacagcctcctcgtcaccaggctcctcaaccccctcgggagccacgggttcgcccggttcgtcaacgccttccggagcaactggtagccccggagcatcgccaggaacttcgagcacggggtcgcccgcctcgagcaacacctcagtcgtgtacaaaaagactctgtttgtagaattcacggatcaccttttcaacatcgctaagccaaggccaccctggatgggtctgctaggtcctaccatccaggctgaggtttatgatacagtggtcattacacttaagaacatggcttcccatcctgtcagtcttcatgctgttggtgtatcctactggaaagcttctgagggagctgaatatgatgatcagaccagtcaaagggagaaagaagatgataaagtcttccctggtggaagccatacatatgtctggcaggtcctgaaagagaatggtccaatggcctctgacccactgtgccttacctactcatatctttctcatgtggacctggtaaaagacttgaattcaggcctcattggagccctactagtatgtagagaagggagtctggccaaggaaaagacacagaccttgcacaaatttatactactttttgctgtatttgatgaagggaaaagttggcactcagaaacaaagaactccttgatgcaggatagggatgctgcatctgctcgggcctggcctaaaatgcacacagtcaatggttatgtaaacaggtctctgccaggtctgattggatgccacaggaaatcagtctattggcatgtgattggaatgggcaccactcctgaagtgcactcaatattcctcgaaggtcacacatttcttgtgaggaaccatcgccaggctagcttggaaatctcgccaataactttccttactgctcaaacactcttgatggaccttggacagtttctactgttttgtcatatctcttcccaccaacatgatggcatggaagcttatgtcaaagtagacagctgtccagaggaaccccaactacgaatgaaaaataatgaagaagcggaagactatgatgatgatcttactgattctgaaatggatgtggtcaggtttgatgatgacaactctccttcctttatccaaattcgctcagttgccaagaagcatcctaaaacttgggtacattacattgctgctgaagaggaggactgggactatgctcccttagtcctcgcccccgatgacagaagttataaaagtggcgcgccaaccagtacggagccgtccgaggggagcgcaccaggaagcccggctgggagcccgacttctaccgaagagggtacatctaccgaaccaagtgaaggttcagcaccaggcacctcaacagaaccctctgagggctcggcgcctggtacaagtgagtccgccaccccagaatccgggcctgggacaagcacagaaccttcggaagggagtgcccctggaacatccgaatcggcaaccccagaatcagggccaggatctgagcccgcgacttcgggctccgagacgcctgggacatccaccgagccctccgaaggatcagccccaggcaccagcacggagccctctgagggaagcgcacctggtaccagcgaaagcgcaactcccgaatcaggtcccggtacgagcgagtcggcgaccccggagagcgggccaggtgcctcgagccaatatttgaacaatggccctcagcggattggtaggaagtacaaaaaagtccgatttatggcatacacagatgaaacctttaagactcgtgaagctattcagcatgaatcaggaatcttgggacctttactttatggggaagttggagacacactgttgattatatttaagaatcaagcaagcagaccatataacatctaccctcacggaatcactgatgtccgtcctttgtattcaaggagattaccaaaaggtgtaaaacatttgaaggattttccaattctgccaggagaaatattcaaatataaatggacagtgactgtagaagatgggccaactaaatcagatcctcggtgcctgacccgctattactctagtttcgttaatatggagagagatctagcttcaggactcattggccctctcctcatctgctacaaagaatctgtagatcaaagaggaaaccagataatgtcagacaagaggaatgtcatcctgttttctgtatttgatgagaaccgaagctggtacctcacagagaatatacaacgctttctccccaatccagctggagtgcagcttgaggatccagagttccaagcctccaacatcatgcacagcatcaatggctatgtttttgatagtttgcagttgtcagtttgtttgcatgaggtggcatactggtacattctaagcattggagcacagactgacttcctttctgtcttcttctctggatataccttcaaacacaaaatggtctatgaagacacactcaccctattcccattctcaggagaaactgtcttcatgtcgatggaaaacccaggtctatggattctggggtgccacaactcagactttcggaacagaggcatgaccgccttactgaaggtttctagttgtgacaagaacactggtgattattacgaggacagttatgaagatatttcagcatacttgctgagtaaaaacaatgccattgaaccaagaagcttctctcaaaacggcgcgccaagtcccgctggaagcccaactagcaccgaagaggggacctcagagtccgccacccccgagtccggccctggctctgagcctgccactagcggctccgagactcctggcacatccgaaagcgctacacccgagagtggacccggcacctctaccgagcccagtgagggctccgcccctggaacaagcaccgagcccagcgaaggcagcgccccagggacctccacagagcccagtgaaggcagtgctcctggcaccagcaccgaaccaagcgagggctctgcacccgggacctccaccgagccaagcgaaggctctgcccctggcacttccaccgagcccagcgaaggcagcgcccctgggagccccgctggctctcccaccagcactgaggagggcacatctaccgaaccaagtgaaggctctgcaccaggtgcctcgagcccaccagtcttgaaacgccatcaagctgaaataactcgtactactcttcagtcagatcaagaggaaatcgattatgatgataccatatcagttgaaatgaagaaggaagattttgacatttatgatgaggatgaaaatcagagcccccgcagctttcaaaagaaaacacgacactattttattgctgcagtggagaggctctgggattatgggatgagtagctccccacatgttctaagaaacagggctcagagtggcagtgtccctcagttcaagaaagttgttttccaggaatttactgatggctcctttactcagcccttataccgtggagaactaaatgaacatttgggactcctggggccatatataagagcagaagttgaagataatatcatggtaactttcagaaatcaggcctctcgtccctattccttctattctagccttatttcttatgaggaagatcagaggcaaggagcagaacctagaaaaaactttgtcaagcctaatgaaaccaaaacttacttttggaaagtgcaacatcatatggcacccactaaagatgagtttgactgcaaagcctgggcttatttctctgatgttgacctggaaaaagatgtgcactcaggcctgattggaccccttctggtctgccacactaacacactgaaccctgctcatgggagacaagtgacagtacaggaatttgctctgtttttcaccatctttgatgagaccaaaagctggtacttcactgaaaatatggaaagaaactgcagggctccctgcaatatccagatggaagatcccacttttaaagagaattatcgcttccatgcaatcaatggctacataatggatacactacctggcttagtaatggctcaggatcaaaggattcgatggtatctgctcagcatgggcagcaatgaaaacatccattctattcatttcagtggacatgtgttcactgtacgaaaaaaagaggagtataaaatggcactgtacaatctctatccaggtgtttttgagacagtggaaatgttaccatccaaagctggaatttggcgggtggaatgccttattggcgagcatctacatgctgggatgagcacactttttctggtgtacagcaataagtgtcagactcccctgggaatggcttctggacacattagagattttcagattacagcttcaggacaatatggacagtgggccccaaagctggccagacttcattattccggatcaatcaatgcctggagcaccaaggagcccttttcttggatcaaggtggatctgttggcaccaatgattattcacggcatcaagacccagggtgcccgtcagaagttctccagcctctacatctctcagtttatcatcatgtatagtcttgatgggaagaagtggcagacttatcgaggaaattccactggaaccttaatggtcttctttggcaatgtggattcatctgggataaaacacaatatttttaaccctccaattattgctcgatacatccgtttgcacccaactcattatagcattcgcagcactcttcgcatggagttgatgggctgtgatttaaatagttgcagcatgccattgggaatggagagtaaagcaatatcagatgcacagattactgcttcatcctactttaccaatatgtttgccacctggtctccttcaaaagctcgacttcacctccaagggaggagtaatgcctggagacctcaggtgaataatccaaaagagtggctgcaagtggacttccagaagacaatgaaagtcacaggagtaactactcagggagtaaaatctctgcttaccagcatgtatgtgaaggagttcctcatctccagcagtcaagatggccatcagtggactctcttttttcagaatggcaaagtaaaggtttttcagggaaatcaagactccttcacacctgtggtgaactctctagacccaccgttactgactcgctaccttcgaattcacccccagagttgggtgcaccagattgccctgaggatggaggttctgggctgcgaggcacaggacctctacggcgcgccaggtacctcagagtctgctacccccgagtcagggccaggatcagagccagccacctccgggtctgagacacccgggacttccgagagtgccacccctgagtccggacccgggtccgagcccgccacttccggctccgaaactcccggcacaagcgagagcgctaccccagagtcaggaccaggaacatctacagagccctctgaaggctccgctccagggtccccagccggcagtcccactagcaccgaggagggaacctctgaaagcgccacacccgaatcagggccagggtctgagcctgctaccagcggcagcgagacaccaggcacctctgagtccgccacaccagagtccggacccggatctcccgctgggagccccacctccactgaggagggatctcctgctggctctccaacatctactgaggaaggtacctcaaccgagccatccgagggatcagctcccggcacctcagagtcggcaaccccggagtctggacccggaacttccgaaagtgccacaccagagtccggtcccgggacttcagaatcagcaacacccgagtccggccctgggtctgaacccgccacaagtggtagtgagacaccaggatcagaacctgctacctcagggtcagagacacccggatctccggcaggctcaccaacctccactgaggagggcaccagcacagaaccaagcgagggctccgcacccggaacaagcactgaacccagtgagggttcagcacccggctctgagccggccacaagtggcagtgagacacccggcacttcagagagtgccacccccgagagtggcccaggcactagtaccgagccctctgaaggcagtgcgccagcctcgagcgaacaaaaactcatctcagaagaggatctgtcacctgcaaccggtcatcatcaccatcaccattga

SEQ ID NO: 1225 - protein, 2203 aa, synthetic construct
  REGION 1..2203: note = Description of Artificial Sequence: Synthetic polypeptide
ATRRYYLGAVELSWDYMQSDLGELPVDARFPPRVPKSFPFGAPGSSPSASTGTGPGSSPSASTGTGPGASPGTSSTGSPGASPGTSSTGSPGSSTPSGATGSPGSSPSASTGTGPGASPGTSSTGSPGSSPSASTGTGPGTPGSGTASSSPGSSTPSGATGSPGSSTPSGATGSPGASPGTSSTGSPASSNTSVVYKKTLFVEFTDHLFNIAKPRPPWMGLLGPTIQAEVYDTVVITLKNMASHPVSLHAVGVSYWKASEGAEYDDQTSQREKEDDKVFPGGSHTYVWQVLKENGPMASDPLCLTYSYLSHVDLVKDLNSGLIGALLVCREGSLAKEKTQTLHKFILLFAVFDEGKSWHSETKNSLMQDRDAASARAWPKMHTVNGYVNRSLPGLIGCHRKSVYWHVIGMGTTPEVHSIFLEGHTFLVRNHRQASLEISPITFLTAQTLLMDLGQFLLFCHISSHQHDGMEAYVKVDSCPEEPQLRMKNNEEAEDYDDDLTDSEMDVVRFDDDNSPSFIQIRSVAKKHPKTWVHYIAAEEEDWDYAPLVLAPDDRSYKSGAPGASPGTSSTGSPGSSPSASTGTGPGSSPSASTGTGPGTPGSGTASSSPGSSTPSGATGSPGSSPSASTGTGPGASPGTSSTGSPGTPGSGTASSSPGSSTPSGATGSPGTPGSGTASSSPGASPGTSSTGSPGASPGTSSTGSPASSQYLNNGPQRIGRKYKKVRFMAYTDETFKTREAIQHESGILGPLLYGEVGDTLLIIFKNQASRPYNIYPHGITDVRPLYSRRLPKGVKHLKDFPILPGEIFKYKWTVTVEDGPTKSDPRCLTRYYSSFVNMERDLASGLIGPLLICYKESVDQRGNQIMSDKRNVILFSVFDENRSWYLTENIQRFLPNPAGVQLEDPEFQASNIMHSINGYVFDSLQLSVCLHEVAYWYILSIGAQTDFLSVFFSGYTFKHKMVYEDTLTLFPFSGETVFMSMENPGLWILGCHNSDFRNRGMTALLKVSSCDKNTGDYYEDSYEDISAYLLSKNNAIEPRSFSQNGAPSPAGSPTSTEEGTSESATPESGPGSEPATSGSETPGTSESATPESGPGTSTEPSEGSAPGTSTEPSEGSAPGTSTEPSEGSAPGTSTEPSEGSAPGTSTEPSEGSAPGTSTEPSEGSAPGSPAGSPTSTEEGTSTEPSEGSAPGASSPPVLKRHQAEITRTTLQSDQEEIDYDDTISVEMKKEDFDIYDEDENQSPRSFQKKTRHYFIAAVERLWDYGMSSSPHVLRNRAQSGSVPQFKKVVFQEFTDGSFTQPLYRGELNEHLGLLGPYIRAEVEDNIMVTFRNQASRPYSFYSSLISYEEDQRQGAEPRKNFVKPNETKTYFWKVQHHMAPTKDEFDCKAWAYFSDVDLEKDVHSGLIGPLLVCHTNTLNPAHGRQVTVQEFALFFTIFDETKSWYFTENMERNCRAPCNIQMEDPTFKENYRFHAINGYIMDTLPGLVMAQDQRIRWYLLSMGSNENIHSIHFSGHVFTVRKKEEYKMALYNLYPGVFETVEMLPSKAGIWRVECLIGEHLHAGMSTLFLVYSNKCQTPLGMASGHIRDFQITASGQYGQWAPKLARLHYSGSINAWSTKEPFSWIKVDLLAPMIIHGIKTQGARQKFSSLYISQFIIMYSLDGKKWQTYRGNSTGTLMVFFGNVDSSGIKHNIFNPPIIARYIRLHPTHYSIRSTLRMELMGCDLNSCSMPLGMESKAISDAQITASSYFTNMFATWSPSKARLHLQGRSNAWRPQVNNPKEWLQVDFQKTMKVTGVTTQGVKSLLTSMYVKEFLISSSQDGHQWTLFFQNGKVKVFQGNQDSFTPVVNSLDPPLLTRYLRIHPQSWVHQIALRMEVLGCEAQDLYGAPGTSESATPESGPGSEPATSGSETPGTSESATPESGPGSEPATSGSETPGTSESATPESGPGTSTEPSEGSAPGSPAGSPTSTEEGTSESATPESGPGSEPATSGSETPGTSESATPESGPGSPAGSPTSTEEGSPAGSPTSTEEGTSTEPSEGSAPGTSESATPESGPGTSESATPESGPGTSESATPESGPGSEPATSGSETPGSEPATSGSETPGSPAGSPTSTEEGTSTEPSEGSAPGTSTEPSEGSAPGSEPATSGSETPGTSESATPESGPGTSTEPSEGSAPASSEQKLISEEDLSPATGHHHHHH

SEQ ID NO: 1226 - DNA, 6612 bp, synthetic construct
  misc_feature 1..6612: note = Description of Artificial Sequence: Synthetic polynucleotide
  source 1..6612: mol_type = other DNA
gccaccagaagatactacctgggtgcagtggaactgtcatgggactatatgcaaagtgatctcggtgagctgcctgtggacgcaagatttcctcctagagtgccaaaatcttttccattcggcgcgccaggctccagcccctccgcgagcacgggaaccggaccaggttcgtcaccctcagcatcaacggggacgggaccgggggcgtcaccaggaacgtcctccaccggctcgccgggtgcatcacccggaacgtcatcgaccggatcgccagggagctcgacgccatcaggcgcaacaggatcacctggctcaagccctagcgcgtcaaccggcacgggtccgggtgcctcccctggcacgtccagcaccggatcacccggatcgagcccatccgcctcaaccggaaccggacccggtacaccagggtcgggaacagcctcctcgtcaccaggctcctcaaccccctcgggagccacgggttcgcccggttcgtcaacgccttccggagcaactggtagccccggagcatcgccaggaacttcgagcacggggtcgcccgcctcgagcaacacctcagtcgtgtacaaaaagactctgtttgtagaattcacggatcaccttttcaacatcgctaagccaaggccaccctggatgggtctgctaggtcctaccatccaggctgaggtttatgatacagtggtcattacacttaagaacatggcttcccatcctgtcagtcttcatgctgttggtgtatcctactggaaagcttctgagggagctgaatatgatgatcagaccagtcaaagggagaaagaagatgataaagtcttccctggtggaagccatacatatgtctggcaggtcctgaaagagaatggtccaatggcctctgacccactgtgccttacctactcatatctttctcatgtggacctggtaaaagacttgaattcaggcctcattggagccctactagtatgtagagaagggagtctggccaaggaaaagacacagaccttgcacaaatttatactactttttgctgtatttgatgaagggaaaagttggcactcagaaacaaagaactccttgatgcaggatagggatgctgcatctgctcgggcctggcctaaaatgcacacagtcaatggttatgtaaacaggtctctgccaggtctgattggatgccacaggaaatcagtctattggcatgtgattggaatgggcaccactcctgaagtgcactcaatattcctcgaaggtcacacatttcttgtgaggaaccatcgccaggctagcttggaaatctcgccaataactttccttactgctcaaacactcttgatggaccttggacagtttctactgttttgtcatatctcttcccaccaacatgatggcatggaagcttatgtcaaagtagacagctgtccagaggaaccccaactacgaatgaaaaataatgaagaagcggaagactatgatgatgatcttactgattctgaaatggatgtggtcaggtttgatgatgacaactctccttcctttatccaaattcgctcagttgccaagaagcatcctaaaacttgggtacattacattgctgctgaagaggaggactgggactatgctcccttagtcctcgcccccgatgacagaagttataaaagtggcgcgccaggtgcctcgccgggaacatcatcaactggttcacccgggtcatccccctcggcctcaaccgggacgggtcccggctcatcccccagcgccagcactggaacaggtcctggcactcctggttccggtacggcatcgtcatccccgggaagctcaacaccgtccggagcgacaggatcacctggctcgtcaccttcggcgtcaactggaacggggccaggggcctcacccggaacgtcctcgactgggtcgcctggtacgccgggatcaggaacggcctcatcctcgcctgggtcctcaacgccctcgggtgcgactggttcgccgggaactcctggctcggggacggcctcgtcgtcgcctggggcatcaccggggacgagctccacggggtcccctggagcgtcaccggggacctcctcgacaggtagcccggcctcgagccaatatttgaacaatggccctcagcggattggtaggaagtacaaaaaagtccgatttatggcatacacagatgaaacctttaagactcgtgaagctattcagcatgaatcaggaatcttgggacctttactttatggggaagttggagacacactgttgattatatttaagaatcaagcaagcagaccatataacatctaccctcacggaatcactgatgtccgtcctttgtattcaaggagattaccaaaaggtgtaaaacatttgaaggattttccaattctgccaggagaaatattcaaatataaatggacagtgactgtagaagatgggccaactaaatcagatcctcggtgcctgacccgctattactctagtttcgttaatatggagagagatctagcttcaggactcattggccctctcctcatctgctacaaagaatctgtagatcaaagaggaaaccagataatgtcagacaagaggaatgtcatcctgttttctgtatttgatgagaaccgaagctggtacctcacagagaatatacaacgctttctccccaatccagctggagtgcagcttgaggatccagagttccaagcctccaacatcatgcacagcatcaatggctatgtttttgatagtttgcagttgtcagtttgtttgcatgaggtggcatactggtacattctaagcattggagcacagactgacttcctttctgtcttcttctctggatataccttcaaacacaaaatggtctatgaagacacactcaccctattcccattctcaggagaaactgtcttcatgtcgatggaaaacccaggtctatggattctggggtgccacaactcagactttcggaacagaggcatgaccgccttactgaaggtttctagttgtgacaagaacactggtgattattacgaggacagttatgaagatatttcagcatacttgctgagtaaaaacaatgccattgaaccaagaagcttctctcaaaacggcgcgccaagtcccgctggaagcccaactagcaccgaagaggggacctcagagtccgccacccccgagtccggccctggctctgagcctgccactagcggctccgagactcctggcacatccgaaagcgctacacccgagagtggacccggcacctctaccgagcccagtgagggctccgcccctggaacaagcaccgagcccagcgaaggcagcgccccagggacctccacagagcccagtgaaggcagtgctcctggcaccagcaccgaaccaagcgagggctctgcacccgggacctccaccgagccaagcgaaggctctgcccctggcacttccaccgagcccagcgaaggcagcgcccctgggagccccgctggctctcccaccagcactgaggagggcacatctaccgaaccaagtgaaggctctgcaccaggtgcctcgagcccaccagtcttgaaacgccatcaagctgaaataactcgtactactcttcagtcagatcaagaggaaatcgattatgatgataccatatcagttgaaatgaagaaggaagattttgacatttatgatgaggatgaaaatcagagcccccgcagctttcaaaagaaaacacgacactattttattgctgcagtggagaggctctgggattatgggatgagtagctccccacatgttctaagaaacagggctcagagtggcagtgtccctcagttcaagaaagttgttttccaggaatttactgatggctcctttactcagcccttataccgtggagaactaaatgaacatttgggactcctggggccatatataagagcagaagttgaagataatatcatggtaactttcagaaatcaggcctctcgtccctattccttctattctagccttatttcttatgaggaagatcagaggcaaggagcagaacctagaaaaaactttgtcaagcctaatgaaaccaaaacttacttttggaaagtgcaacatcatatggcacccactaaagatgagtttgactgcaaagcctgggcttatttctctgatgttgacctggaaaaagatgtgcactcaggcctgattggaccccttctggtctgccacactaacacactgaaccctgctcatgggagacaagtgacagtacaggaatttgctctgtttttcaccatctttgatgagaccaaaagctggtacttcactgaaaatatggaaagaaactgcagggctccctgcaatatccagatggaagatcccacttttaaagagaattatcgcttccatgcaatcaatggctacataatggatacactacctggcttagtaatggctcaggatcaaaggattcgatggtatctgctcagcatgggcagcaatgaaaacatccattctattcatttcagtggacatgtgttcactgtacgaaaaaaagaggagtataaaatggcactgtacaatctctatccaggtgtttttgagacagtggaaatgttaccatccaaagctggaatttggcgggtggaatgccttattggcgagcatctacatgctgggatgagcacactttttctggtgtacagcaataagtgtcagactcccctgggaatggcttctggacacattagagattttcagattacagcttcaggacaatatggacagtgggccccaaagctggccagacttcattattccggatcaatcaatgcctggagcaccaaggagcccttttcttggatcaaggtggatctgttggcaccaatgattattcacggcatcaagacccagggtgcccgtcagaagttctccagcctctacatctctcagtttatcatcatgtatagtcttgatgggaagaagtggcagacttatcgaggaaattccactggaaccttaatggtcttctttggcaatgtggattcatctgggataaaacacaatatttttaaccctccaattattgctcgatacatccgtttgcacccaactcattatagcattcgcagcactcttcgcatggagttgatgggctgtgatttaaatagttgcagcatgccattgggaatggagagtaaagcaatatcagatgcacagattactgcttcatcctactttaccaatatgtttgccacctggtctccttcaaaagctcgacttcacctccaagggaggagtaatgcctggagacctcaggtgaataatccaaaagagtggctgcaagtggacttccagaagacaatgaaagtcacaggagtaactactcagggagtaaaatctctgcttaccagcatgtatgtgaaggagttcctcatctccagcagtcaagatggccatcagtggactctcttttttcagaatggcaaagtaaaggtttttcagggaaatcaagactccttcacacctgtggtgaactctctagacccaccgttactgactcgctaccttcgaattcacccccagagttgggtgcaccagattgccctgaggatggaggttctgggctgcgaggcacaggacctctacggcgcgccaggtacctcagagtctgctacccccgagtcagggccaggatcagagccagccacctccgggtctgagacacccgggacttccgagagtgccacccctgagtccggacccgggtccgagcccgccacttccggctccgaaactcccggcacaagcgagagcgctaccccagagtcaggaccaggaacatctacagagccctctgaaggctccgctccagggtccccagccggcagtcccactagcaccgaggagggaacctctgaaagcgccacacccgaatcagggccagggtctgagcctgctaccagcggcagcgagacaccaggcacctctgagtccgccacaccagagtccggacccggatctcccgctgggagccccacctccactgaggagggatctcctgctggctctccaacatctactgaggaaggtacctcaaccgagccatccgagggatcagctcccggcacctcagagtcggcaaccccggagtctggacccggaacttccgaaagtgccacaccagagtccggtcccgggacttcagaatcagcaacacccgagtccggccctgggtctgaacccgccacaagtggtagtgagacaccaggatcagaacctgctacctcagggtcagagacacccggatctccggcaggctcaccaacctccactgaggagggcaccagcacagaaccaagcgagggctccgcacccggaacaagcactgaacccagtgagggttcagcacccggctctgagccggccacaagtggcagtgagacacccggcacttcagagagtgccacccccgagagtggcccaggcactagtaccgagccctctgaaggcagtgcgccagcctcgagcgaacaaaaactcatctcagaagaggatctgtcacctgcaaccggtcatcatcaccatcaccattga

SEQ ID NO: 1227 - protein, 2203 aa, synthetic construct
  REGION 1..2203: note = Description of Artificial Sequence: Synthetic polypeptide
ATRRYYLGAVELSWDYMQGAPTSESATPESGPGSEPATSGSETPGTSESATPESGPGSEPATSGSETPGTSESATPESGPGTSTEPSEGSAPGSPAGSPTSTEEGTSESATPESGPGSEPATSGSETPGTSESATPESGPGSPAGSPTSTEEGSPAGSPTSTEEGASSSDLGELPVDARFPPRVPKSFPFNTSVVYKKTLFVEFTDHLFNIAKPRPPWMGLLGPTIQAEVYDTVVITLKNMASHPVSLHAVGVSYWKASEGAEYDDQTSQREKEDDKVFPGGSHTYVWQVLKENGPMASDPLCLTYSYLSHVDLVKDLNSGLIGALLVCREGSLAKEKTQTLHKFILLFAVFDEGKSWHSETKNSLMQDRDAASARAWPKMHTVNGYVNRSLPGLIGCHRKSVYWHVIGMGTTPEVHSIFLEGHTFLVRNHRQASLEISPITFLTAQTLLMDLGQFLLFCHISSHQHDGMEAYVKVDSCPEEPQLRMKNNEEAEDYDDDLTDSEMDVVRFDDDNSPSFIQIRSVAKKHPKTWVHYIAAEEEDWDYAPLVLAPDDRSYKSGAPGASPGTSSTGSPGSSPSASTGTGPGSSPSASTGTGPGTPGSGTASSSPGSSTPSGATGSPGSSPSASTGTGPGASPGTSSTGSPGTPGSGTASSSPGSSTPSGATGSPGTPGSGTASSSPGASPGTSSTGSPGASPGTSSTGSPASSQYLNNGPQRIGRKYKKVRFMAYTDETFKTREAIQHESGILGPLLYGEVGDTLLIIFKNQASRPYNIYPHGITDVRPLYSRRLPKGVKHLKDFPILPGEIFKYKWTVTVEDGPTKSDPRCLTRYYSSFVNMERDLASGLIGPLLICYKESVDQRGNQIMSDKRNVILFSVFDENRSWYLTENIQRFLPNPAGVQLEDPEFQASNIMHSINGYVFDSLQLSVCLHEVAYWYILSIGAQTDFLSVFFSGYTFKHKMVYEDTLTLFPFSGETVFMSMENPGLWILGCHNSDFRNRGMTALLKVSSCDKNTGDYYEDSYEDISAYLLSKNNAIEPRSFSQNGAPSPAGSPTSTEEGTSESATPESGPGSEPATSGSETPGTSESATPESGPGTSTEPSEGSAPGTSTEPSEGSAPGTSTEPSEGSAPGTSTEPSEGSAPGTSTEPSEGSAPGTSTEPSEGSAPGSPAGSPTSTEEGTSTEPSEGSAPGASSPPVLKRHQAEITRTTLQSDQEEIDYDDTISVEMKKEDFDIYDEDENQSPRSFQKKTRHYFIAAVERLWDYGMSSSPHVLRNRAQSGSVPQFKKVVFQEFTDGSFTQPLYRGELNEHLGLLGPYIRAEVEDNIMVTFRNQASRPYSFYSSLISYEEDQRQGAEPRKNFVKPNETKTYFWKVQHHMAPTKDEFDCKAWAYFSDVDLEKDVHSGLIGPLLVCHTNTLNPAHGRQVTVQEFALFFTIFDETKSWYFTENMERNCRAPCNIQMEDPTFKENYRFHAINGYIMDTLPGLVMAQDQRIRWYLLSMGSNENIHSIHFSGHVFTVRKKEEYKMALYNLYPGVFETVEMLPSKAGIWRVECLIGEHLHAGMSTLFLVYSNKCQTPLGMASGHIRDFQITASGQYGQWAPKLARLHYSGSINAWSTKEPFSWIKVDLLAPMIIHGIKTQGARQKFSSLYISQFIIMYSLDGKKWQTYRGNSTGTLMVFFGNVDSSGIKHNIFNPPIIARYIRLHPTHYSIRSTLRMELMGCDLNSCSMPLGMESKAISDAQITASSYFTNMFATWSPSKARLHLQGRSNAWRPQVNNPKEWLQVDFQKTMKVTGVTTQGVKSLLTSMYVKEFLISSSQDGHQWTLFFQNGKVKVFQGNQDSFTPVVNSLDPPLLTRYLRIHPQSWVHQIALRMEVLGCEAQDLYGAPGTSESATPESGPGSEPATSGSETPGTSESATPESGPGSEPATSGSETPGTSESATPESGPGTSTEPSEGSAPGSPAGSPTSTEEGTSESATPESGPGSEPATSGSETPGTSESATPESGPGSPAGSPTSTEEGSPAGSPTSTEEGTSTEPSEGSAPGTSESATPESGPGTSESATPESGPGTSESATPESGPGSEPATSGSETPGSEPATSGSETPGSPAGSPTSTEEGTSTEPSEGSAPGTSTEPSEGSAPGSEPATSGSETPGTSESATPESGPGTSTEPSEGSAPASSEQKLISEEDLSPATGHHHHHH

SEQ ID NO: 1228 - DNA, 6612 bp, synthetic construct
  misc_feature 1..6612: note = Description of Artificial Sequence: Synthetic polynucleotide
  source 1..6612: mol_type = other DNA
gccaccagaagatactacctgggtgcagtggaactgtcatgggactatatgcaaggcgcgccaacatcagagagcgccacccctgaaagtggtcccgggagcgagccagccacatctgggtcggaaacgccaggcacaagtgagtctgcaactcccgagtccggacctggctccgagcctgccactagcggctccgagactccgggaacttccgagagcgctacaccagaaagcggacccggaaccagtaccgaacctagcgagggctctgctccgggcagcccagccggctctcctacatccacggaggagggcacttccgaatccgccaccccggagtcagggccaggatctgaacccgctacctcaggcagtgagacgccaggaacgagcgagtccgctacaccggagagtgggccagggagccctgctggatctcctacgtccactgaggaagggtcaccagcgggctcgcccaccagcactgaagaaggtgcctcgagcagtgatctcggtgagctgcctgtggacgcaagatttcctcctagagtgccaaaatcttttccattcaacacctcagtcgtgtacaaaaagactctgtttgtagaattcacggatcaccttttcaacatcgctaagccaaggccaccctggatgggtctgctaggtcctaccatccaggctgaggtttatgatacagtggtcattacacttaagaacatggcttcccatcctgtcagtcttcatgctgttggtgtatcctactggaaagcttctgagggagctgaatatgatgatcagaccagtcaaagggagaaagaagatgataaagtcttccctggtggaagccatacatatgtctggcaggtcctgaaagagaatggtccaatggcctctgacccactgtgccttacctactcatatctttctcatgtggacctggtaaaagacttgaattcaggcctcattggagccctactagtatgtagagaagggagtctggccaaggaaaagacacagaccttgcacaaatttatactactttttgctgtatttgatgaagggaaaagttggcactcagaaacaaagaactccttgatgcaggatagggatgctgcatctgctcgggcctggcctaaaatgcacacagtcaatggttatgtaaacaggtctctgccaggtctgattggatgccacaggaaatcagtctattggcatgtgattggaatgggcaccactcctgaagtgcactcaatattcctcgaaggtcacacatttcttgtgaggaaccatcgccaggctagcttggaaatctcgccaataactttccttactgctcaaacactcttgatggaccttggacagtttctactgttttgtcatatctcttcccaccaacatgatggcatggaagcttatgtcaaagtagacagctgtccagaggaaccccaactacgaatgaaaaataatgaagaagcggaagactatgatgatgatcttactgattctgaaatggatgtggtcaggtttgatgatgacaactctccttcctttatccaaattcgctcagttgccaagaagcatcctaaaacttgggtacattacattgctgctgaagaggaggactgggactatgctcccttagtcctcgcccccgatgacagaagttataaaagtggcgcgccaggtgcctcgccgggaacatcatcaactggttcacccgggtcatccccctcggcctcaaccgggacgggtcccggctcatcccccagcgccagcactggaacaggtcctggcactcctggttccggtacggcatcgtcatccccgggaagctcaacaccgtccggagcgacaggatcacctggctcgtcaccttcggcgtcaactggaacggggccaggggcctcacccggaacgtcctcgactgggtcgcctggtacgccgggatcaggaacggcctcatcctcgcctgggtcctcaacgccctcgggtgcgactggttcgccgggaactcctggctcggggacggcctcgtcgtcgcctggggcatcaccggggacgagctccacggggtcccctggagcgtcaccggggacctcctcgacaggtagcccggcctcgagccaatatttgaacaatggccctcagcggattggtaggaagtacaaaaaagtccgatttatggcatacacagatgaaacctttaagactcgtgaagctattcagcatgaatcaggaatcttgggacctttactttatggggaagttggagacacactgttgattatatttaagaatcaagcaagcagaccatataacatctaccctcacggaatcactgatgtccgtcctttgtattcaaggagattaccaaaaggtgtaaaacatttgaaggattttccaattctgccaggagaaatattcaaatataaatggacagtgactgtagaagatgggccaactaaatcagatcctcggtgcctgacccgctattactctagtttcgttaatatggagagagatctagcttcaggactcattggccctctcctcatctgctacaaagaatctgtagatcaaagaggaaaccagataatgtcagacaagaggaatgtcatcctgttttctgtatttgatgagaaccgaagctggtacctcacagagaatatacaacgctttctccccaatccagctggagtgcagcttgaggatccagagttccaagcctccaacatcatgcacagcatcaatggctatgtttttgatagtttgcagttgtcagtttgtttgcatgaggtggcatactggtacattctaagcattggagcacagactgacttcctttctgtcttcttctctggatataccttcaaacacaaaatggtctatgaagacacactcaccctattcccattctcaggagaaactgtcttcatgtcgatggaaaacccaggtctatggattctggggtgccacaactcagactttcggaacagaggcatgaccgccttactgaaggtttctagttgtgacaagaacactggtgattattacgaggacagttatgaagatatttcagcatacttgctgagtaaaaacaatgccattgaaccaagaagcttctctcaaaacggcgcgccaagtcccgctggaagcccaactagcaccgaagaggggacctcagagtccgccacccccgagtccggccctggctctgagcctgccactagcggctccgagactcctggcacatccgaaagcgctacacccgagagtggacccggcacctctaccgagcccagtgagggctccgcccctggaacaagcaccgagcccagcgaaggcagcgccccagggacctccacagagcccagtgaaggcagtgctcctggcaccagcaccgaaccaagcgagggctctgcacccgggacctccaccgagccaagcgaaggctctgcccctggcacttccaccgagcccagcgaaggcagcgcccctgggagccccgctggctctcccaccagcactgaggagggcacatctaccgaaccaagtgaaggctctgcaccaggtgcctcgagcccaccagtcttgaaacgccatcaagctgaaataactcgtactactcttcagtcagatcaagaggaaatcgattatgatgataccatatcagttgaaatgaagaaggaagattttgacatttatgatgaggatgaaaatcagagcccccgcagctttcaaaagaaaacacgacactattttattgctgcagtggagaggctctgggattatgggatgagtagctccccacatgttctaagaaacagggctcagagtggcagtgtccctcagttcaagaaagttgttttccaggaatttactgatggctcctttactcagcccttataccgtggagaactaaatgaacatttgggactcctggggccatatataagagcagaagttgaagataatatcatggtaactttcagaaatcaggcctctcgtccctattccttctattctagccttatttcttatgaggaagatcagaggcaaggagcagaacctagaaaaaactttgtcaagcctaatgaaaccaaaacttacttttggaaagtgcaacatcatatggcacccactaaagatgagtttgactgcaaagcctgggcttatttctctgatgttgacctggaaaaagatgtgcactcaggcctgattggaccccttctggtctgccacactaacacactgaaccctgctcatgggagacaagtgacagtacaggaatttgctctgtttttcaccatctttgatgagaccaaaagctggtacttcactgaaaatatggaaagaaactgcagggctccctgcaatatccagatggaagatcccacttttaaagagaattatcgcttccatgcaatcaatggctacataatggatacactacctggcttagtaatggctcaggatcaaaggattcgatggtatctgctcagcatgggcagcaatgaaaacatccattctattcatttcagtggacatgtgttcactgtacgaaaaaaagaggagtataaaatggcactgtacaatctctatccaggtgtttttgagacagtggaaatgttaccatccaaagctggaatttggcgggtggaatgccttattggcgagcatctacatgctgggatgagcacactttttctggtgtacagcaataagtgtcagactcccctgggaatggcttctggacacattagagattttcagattacagcttcaggacaatatggacagtgggccccaaagctggccagacttcattattccggatcaatcaatgcctggagcaccaaggagcccttttcttggatcaaggtggatctgttggcaccaatgattattcacggcatcaagacccagggtgcccgtcagaagttctccagcctctacatctctcagtttatcatcatgtatagtcttgatgggaagaagtggcagacttatcgaggaaattccactggaaccttaatggtcttctttggcaatgtggattcatctgggataaaacacaatatttttaaccctccaattattgctcgatacatccgtttgcacccaactcattatagcattcgcagcactcttcgcatggagttgatgggctgtgatttaaatagttgcagcatgccattgggaatggagagtaaagcaatatcagatgcacagattactgcttcatcctactttaccaatatgtttgccacctggtctccttcaaaagctcgacttcacctccaagggaggagtaatgcctggagacctcaggtgaataatccaaaagagtggctgcaagtggacttccagaagacaatgaaagtcacaggagtaactactcagggagtaaaatctctgcttaccagcatgtatgtgaaggagttcctcatctccagcagtcaagatggccatcagtggactctcttttttcagaatggcaaagtaaaggtttttcagggaaatcaagactccttcacacctgtggtgaactctctagacccaccgttactgactcgctaccttcgaattcacccccagagttgggtgcaccagattgccctgaggatggaggttctgggctgcgaggcacaggacctctacggcgcgccaggtacctcagagtctgctacccccgagtcagggccaggatcagagccagccacctccgggtctgagacacccgggacttccgagagtgccacccctgagtccggacccgggtccgagcccgccacttccggctccgaaactcccggcacaagcgagagcgctaccccagagtcaggaccaggaacatctacagagccctctgaaggctccgctccagggtccccagccggcagtcccactagcaccgaggagggaacctctgaaagcgccacacccgaatcagggccagggtctgagcctgctaccagcggcagcgagacaccaggcacctctgagtccgccacaccagagtccggacccggatctcccgctgggagccccacctccactgaggagggatctcctgctggctctccaacatctactgaggaaggtacctcaaccgagccatccgagggatcagctcccggcacctcagagtcggcaaccccggagtctggacccggaacttccgaaagtgccacaccagagtccggtcccgggacttcagaatcagcaacacccgagtccggccctgggtctgaacccgccacaagtggtagtgagacaccaggatcagaacctgctacctcagggtcagagacacccggatctccggcaggctcaccaacctccactgaggagggcaccagcacagaaccaagcgagggctccgcacccggaacaagcactgaacccagtgagggttcagcacccggctctgagccggccacaagtggcagtgagacacccggcacttcagagagtgccacccccgagagtggcccaggcactagtaccgagccctctgaaggcagtgcgccagcctcgagcgaacaaaaactcatctcagaagaggatctgtcacctgcaaccggtcatcatcaccatcaccattga

SEQ ID NO: 1229 - protein, 2203 aa, synthetic construct
  REGION 1..2203: note = Description of Artificial Sequence: Synthetic polypeptide
ATRRYYLGAVELSWDYMQSDLGELPVGAPGSSPSASTGTGPGSSPSASTGTGPGASPGTSSTGSPGASPGTSSTGSPGSSTPSGATGSPGSSPSASTGTGPGASPGTSSTGSPGSSPSASTGTGPGTPGSGTASSSPGSSTPSGATGSPGSSTPSGATGSPGASPGTSSTGSPASSDARFPPRVPKSFPFNTSVVYKKTLFVEFTDHLFNIAKPRPPWMGLLGPTIQAEVYDTVVITLKNMASHPVSLHAVGVSYWKASEGAEYDDQTSQREKEDDKVFPGGSHTYVWQVLKENGPMASDPLCLTYSYLSHVDLVKDLNSGLIGALLVCREGSLAKEKTQTLHKFILLFAVFDEGKSWHSETKNSLMQDRDAASARAWPKMHTVNGYVNRSLPGLIGCHRKSVYWHVIGMGTTPEVHSIFLEGHTFLVRNHRQASLEISPITFLTAQTLLMDLGQFLLFCHISSHQHDGMEAYVKVDSCPEEPQLRMKNNEEAEDYDDDLTDSEMDVVRFDDDNSPSFIQIRSVAKKHPKTWVHYIAAEEEDWDYAPLVLAPDDRSYKSGAPGASPGTSSTGSPGSSPSASTGTGPGSSPSASTGTGPGTPGSGTASSSPGSSTPSGATGSPGSSPSASTGTGPGASPGTSSTGSPGTPGSGTASSSPGSSTPSGATGSPGTPGSGTASSSPGASPGTSSTGSPGASPGTSSTGSPASSQYLNNGPQRIGRKYKKVRFMAYTDETFKTREAIQHESGILGPLLYGEVGDTLLIIFKNQASRPYNIYPHGITDVRPLYSRRLPKGVKHLKDFPILPGEIFKYKWTVTVEDGPTKSDPRCLTRYYSSFVNMERDLASGLIGPLLICYKESVDQRGNQIMSDKRNVILFSVFDENRSWYLTENIQRFLPNPAGVQLEDPEFQASNIMHSINGYVFDSLQLSVCLHEVAYWYILSIGAQTDFLSVFFSGYTFKHKMVYEDTLTLFPFSGETVFMSMENPGLWILGCHNSDFRNRGMTALLKVSSCDKNTGDYYEDSYEDISAYLLSKNNAIEPRSFSQNGAPSPAGSPTSTEEGTSESATPESGPGSEPATSGSETPGTSESATPESGPGTSTEPSEGSAPGTSTEPSEGSAPGTSTEPSEGSAPGTSTEPSEGSAPGTSTEPSEGSAPGTSTEPSEGSAPGSPAGSPTSTEEGTSTEPSEGSAPGASSPPVLKRHQAEITRTTLQSDQEEIDYDDTISVEMKKEDFDIYDEDENQSPRSFQKKTRHYFIAAVERLWDYGMSSSPHVLRNRAQSGSVPQFKKVVFQEFTDGSFTQPLYRGELNEHLGLLGPYIRAEVEDNIMVTFRNQASRPYSFYSSLISYEEDQRQGAEPRKNFVKPNETKTYFWKVQHHMAPTKDEFDCKAWAYFSDVDLEKDVHSGLIGPLLVCHTNTLNPAHGRQVTVQEFALFFTIFDETKSWYFTENMERNCRAPCNIQMEDPTFKENYRFHAINGYIMDTLPGLVMAQDQRIRWYLLSMGSNENIHSIHFSGHVFTVRKKEEYKMALYNLYPGVFETVEMLPSKAGIWRVECLIGEHLHAGMSTLFLVYSNKCQTPLGMASGHIRDFQITASGQYGQWAPKLARLHYSGSINAWSTKEPFSWIKVDLLAPMIIHGIKTQGARQKFSSLYISQFIIMYSLDGKKWQTYRGNSTGTLMVFFGNVDSSGIKHNIFNPPIIARYIRLHPTHYSIRSTLRMELMGCDLNSCSMPLGMESKAISDAQITASSYFTNMFATWSPSKARLHLQGRSNAWRPQVNNPKEWLQVDFQKTMKVTGVTTQGVKSLLTSMYVKEFLISSSQDGHQWTLFFQNGKVKVFQGNQDSFTPVVNSLDPPLLTRYLRIHPQSWVHQIALRMEVLGCEAQDLYGAPGTSESATPESGPGSEPATSGSETPGTSESATPESGPGSEPATSGSETPGTSESATPESGPGTSTEPSEGSAPGSPAGSPTSTEEGTSESATPESGPGSEPATSGSETPGTSESATPESGPGSPAGSPTSTEEGSPAGSPTSTEEGTSTEPSEGSAPGTSESATPESGPGTSESATPESGPGTSESATPESGPGSEPATSGSETPGSEPATSGSETPGSPAGSPTSTEEGTSTEPSEGSAPGTSTEPSEGSAPGSEPATSGSETPGTSESATPESGPGTSTEPSEGSAPASSEQKLISEEDLSPATGHHHHHH

SEQ ID NO: 1230 - DNA, 6612 bp, synthetic construct
  misc_feature 1..6612: note = Description of Artificial Sequence: Synthetic polynucleotide
  source 1..6612: mol_type = other DNA
gccaccagaagatactacctgggtgcagtggaactgtcatgggactatatgcaaagtgatctcggtgagctgcctgtgggcgcgccaggctccagcccctccgcgagcacgggaaccggaccaggttcgtcaccctcagcatcaacggggacgggaccgggggcgtcaccaggaacgtcctccaccggctcgccgggtgcatcacccggaacgtcatcgaccggatcgccagggagctcgacgccatcaggcgcaacaggatcacctggctcaagccctagcgcgtcaaccggcacgggtccgggtgcctcccctggcacgtccagcaccggatcacccggatcgagcccatccgcctcaaccggaaccggacccggtacaccagggtcgggaacagcctcctcgtcaccaggctcctcaaccccctcgggagccacgggttcgcccggttcgtcaacgccttccggagcaactggtagccccggagcatcgccaggaacttcgagcacggggtcgcccgcctcgagcgacgcaagatttcctcctagagtgccaaaatcttttccattcaacacctcagtcgtgtacaaaaagactctgtttgtagaattcacggatcaccttttcaacatcgctaagccaaggccaccctggatgggtctgctaggtcctaccatccaggctgaggtttatgatacagtggtcattacacttaagaacatggcttcccatcctgtcagtcttcatgctgttggtgtatcctactggaaagcttctgagggagctgaatatgatgatcagaccagtcaaagggagaaagaagatgataaagtcttccctggtggaagccatacatatgtctggcaggtcctgaaagagaatggtccaatggcctctgacccactgtgccttacctactcatatctttctcatgtggacctggtaaaagacttgaattcaggcctcattggagccctactagtatgtagagaagggagtctggccaaggaaaagacacagaccttgcacaaatttatactactttttgctgtatttgatgaagggaaaagttggcactcagaaacaaagaactccttgatgcaggatagggatgctgcatctgctcgggcctggcctaaaatgcacacagtcaatggttatgtaaacaggtctctgccaggtctgattggatgccacaggaaatcagtctattggcatgtgattggaatgggcaccactcctgaagtgcactcaatattcctcgaaggtcacacatttcttgtgaggaaccatcgccaggctagcttggaaatctcgccaataactttccttactgctcaaacactcttgatggaccttggacagtttctactgttttgtcatatctcttcccaccaacatgatggcatggaagcttatgtcaaagtagacagctgtccagaggaaccccaactacgaatgaaaaataatgaagaagcggaagactatgatgatgatcttactgattctgaaatggatgtggtcaggtttgatgatgacaactctccttcctttatccaaattcgctcagttgccaagaagcatcctaaaacttgggtacattacattgctgctgaagaggaggactgggactatgctcccttagtcctcgcccccgatgacagaagttataaaagtggcgcgccaggtgcctcgccgggaacatcatcaactggttcacccgggtcatccccctcggcctcaaccgggacgggtcccggctcatcccccagcgccagcactggaacaggtcctggcactcctggttccggtacggcatcgtcatccccgggaagctcaacaccgtccggagcgacaggatcacctggctcgtcaccttcggcgtcaactggaacggggccaggggcctcacccggaacgtcctcgactgggtcgcctggtacgccgggatcaggaacggcctcatcctcgcctgggtcctcaacgccctcgggtgcgactggttcgccgggaactcctggctcggggacggcctcgtcgtcgcctggggcatcaccggggacgagctccacggggtcccctggagcgtcaccggggacctcctcgacaggtagcccggcctcgagccaatatttgaacaatggccctcagcggattggtaggaagtacaaaaaagtccgatttatggcatacacagatgaaacctttaagactcgtgaagctattcagcatgaatcaggaatcttgggacctttactttatggggaagttggagacacactgttgattatatttaagaatcaagcaagcagaccatataacatctaccctcacggaatcactgatgtccgtcctttgtattcaaggagattaccaaaaggtgtaaaacatttgaaggattttccaattctgccaggagaaatattcaaatataaatggacagtgactgtagaagatgggccaactaaatcagatcctcggtgcctgacccgctattactctagtttcgttaatatggagagagatctagcttcaggactcattggccctctcctcatctgctacaaagaatctgtagatcaaagaggaaaccagataatgtcagacaagaggaatgtcatcctgttttctgtatttgatgagaaccgaagctggtacctcacagagaatatacaacgctttctccccaatccagctggagtgcagcttgaggatccagagttccaagcctccaacatcatgcacagcatcaatggctatgtttttgatagtttgcagttgtcagtttgtttgcatgaggtggcatactggtacattctaagcattggagcacagactgacttcctttctgtcttcttctctggatataccttcaaacacaaaatggtctatgaagacacactcaccctattcccattctcaggagaaactgtcttcatgtcgatggaaaacccaggtctatggattctggggtgccacaactcagactttcggaacagaggcatgaccgccttactgaaggtttctagttgtgacaagaacactggtgattattacgaggacagttatgaagatatttcagcatacttgctgagtaaaaacaatgccattgaaccaagaagcttctctcaaaacggcgcgccaagtcccgctggaagcccaactagcaccgaagaggggacctcagagtccgccacccccgagtccggccctggctctgagcctgccactagcggctccgagactcctggcacatccgaaagcgctacacccgagagtggacccggcacctctaccgagcccagtgagggctccgcccctggaacaagcaccgagcccagcgaaggcagcgccccagggacctccacagagcccagtgaaggcagtgctcctggcaccagcaccgaaccaagcgagggctctgcacccgggacctccaccgagccaagcgaaggctctgcccctggcacttccaccgagcccagcgaaggcagcgcccctgggagccccgctggctctcccaccagcactgaggagggcacatctaccgaaccaagtgaaggctctgcaccaggtgcctcgagcccaccagtcttgaaacgccatcaagctgaaataactcgtactactcttcagtcagatcaagaggaaatcgattatgatgataccatatcagttgaaatgaagaaggaagattttgacatttatgatgaggatgaaaatcagagcccccgcagctttcaaaagaaaacacgacactattttattgctgcagtggagaggctctgggattatgggatgagtagctccccacatgttctaagaaacagggctcagagtggcagtgtccctcagttcaagaaagttgttttccaggaatttactgatggctcctttactcagcccttataccgtggagaactaaatgaacatttgggactcctggggccatatataagagcagaagttgaagataatatcatggtaactttcagaaatcaggcctctcgtccctattccttctattctagccttatttcttatgaggaagatcagaggcaaggagcagaacctagaaaaaactttgtcaagcctaatgaaaccaaaacttacttttggaaagtgcaacatcatatggcacccactaaagatgagtttgactgcaaagcctgggcttatttctctgatgttgacctggaaaaagatgtgcactcaggcctgattggaccccttctggtctgccacactaacacactgaaccctgctcatgggagacaagtgacagtacaggaatttgctctgtttttcaccatctttgatgagaccaaaagctggtacttcactgaaaatatggaaagaaactgcagggctccctgcaatatccagatggaagatcccacttttaaagagaattatcgcttccatgcaatcaatggctacataatggatacactacctggcttagtaatggctcaggatcaaaggattcgatggtatctgctcagcatgggcagcaatgaaaacatccattctattcatttcagtggacatgtgttcactgtacgaaaaaaagaggagtataaaatggcactgtacaatctctatccaggtgtttttgagacagtggaaatgttaccatccaaagctggaatttggcgggtggaatgccttattggcgagcatctacatgctgggatgagcacactttttctggtgtacagcaataagtgtcagactcccctgggaatggcttctggacacattagagattttcagattacagcttcaggacaatatggacagtgggccccaaagctggccagacttcattattccggatcaatcaatgcctggagcaccaaggagcccttttcttggatcaaggtggatctgttggcaccaatgattattcacggcatcaagacccagggtgcccgtcagaagttctccagcctctacatctctcagtttatcatcatgtatagtcttgatgggaagaagtggcagacttatcgaggaaattccactggaaccttaatggtcttctttggcaatgtggattcatctgggataaaacacaatatttttaaccctccaattattgctcgatacatccgtttgcacccaactcattatagcattcgcagcactcttcgcatggagttgatgggctgtgatttaaatagttgcagcatgccattgggaatggagagtaaagcaatatcagatgcacagattactgcttcatcctactttaccaatatgtttgccacctggtctccttcaaaagctcgacttcacctccaagggaggagtaatgcctggagacctcaggtgaataatccaaaagagtggctgcaagtggacttccagaagacaatgaaagtcacaggagtaactactcagggagtaaaatctctgcttaccagcatgtatgtgaaggagttcctcatctccagcagtcaagatggccatcagtggactctcttttttcagaatggcaaagtaaaggtttttcagggaaatcaagactccttcacacctgtggtgaactctctagacccaccgttactgactcgctaccttcgaattcacccccagagttgggtgcaccagattgccctgaggatggaggttctgggctgcgaggcacaggacctctacggcgcgccaggtacctcagagtctgctacccccgagtcagggccaggatcagagccagccacctccgggtctgagacacccgggacttccgagagtgccacccctgagtccggacccgggtccgagcccgccacttccggctccgaaactcccggcacaagcgagagcgctaccccagagtcaggaccaggaacatctacagagccctctgaaggctccgctccagggtccccagccggcagtcccactagcaccgaggagggaacctctgaaagcgccacacccgaatcagggccagggtctgagcctgctaccagcggcagcgagacaccaggcacctctgagtccgccacaccagagtccggacccggatctcccgctgggagccccacctccactgaggagggatctcctgctggctctccaacatctactgaggaaggtacctcaaccgagccatccgagggatcagctcccggcacctcagagtcggcaaccccggagtctggacccggaacttccgaaagtgccacaccagagtccggtcccgggacttcagaatcagcaacacccgagtccggccctgggtctgaacccgccacaagtggtagtgagacaccaggatcagaacctgctacctcagggtcagagacacccggatctccggcaggctcaccaacctccactgaggagggcaccagcacagaaccaagcgagggctccgcacccggaacaagcactgaacccagtgagggttcagcacccggctctgagccggccacaagtggcagtgagacacccggcacttcagagagtgccacccccgagagtggcccaggcactagtaccgagccctctgaaggcagtgcgccagcctcgagcgaacaaaaactcatctcagaagaggatctgtcacctgcaaccggtcatcatcaccatcaccattga

SEQ ID NO: 1231 - protein, 2206 aa, synthetic construct
  REGION 1..2206: note = Description of Artificial Sequence: Synthetic polypeptide
ATRRYYLGAVELSWDYMQSDLGELPVDARFPPRVPKSFPFGAPGSSPSASTGTGPGSSPSASTGTGPGASPGTSSTGSPGASPGTSSTGSPGSSTPSGATGSPGSSPSASTGTGPGASPGTSSTGSPGSSPSASTGTGPGTPGSGTASSSPGSSTPSGATGSPGSSTPSGATGSPGASPGTSSTGSPASSNTSVVYKKTLFVEFTDHLFNIAKPRPPWMGLLGPTIQAEVYDTVVITLKNMASHPVSLHAVGVSYWKASEGAEYDDQTSQREKEDDKVFPGGSHTYVWQVLKENGPMASDPLCLTYSYLSHVDLVKDLNSGLIGALLVCREGSLAKEKTQTLHKFILLFAVFDEGKSWHSETKNSLMQDRDAASARAWPKMHTVNGYVNRSLPGLIGCHRKSVYWHVIGMGTTPEVHSIFLEGHTFLVRNHRQASLEISPITFLTAQTLLMDLGQFLLFCHISSHQHDGMEAYVKVDSCPEEPQLRMKNNEEAEDYDDDLTDSEMDVVRFDDDNSPSFIQIRSVAKKHPKTWVHYIAAEEEDWDYAPLVLAPDDRSYKSQYLNNGPQRIGRKYKKVRFMAYTDETFKTREAIQHESGILGPLLYGEVGDTLLIIFKNQASRPYNIYPHGITDVRPLYSRRLPKGVKHLKDFPILPGEIFKYKWTVTVEDGPTKSDPRCLTRYYSSFVNMERDLASGLIGPLLICYKESVDQRGNQIMSDKRNVILFSVFDENRSWYLTENIQRFLPNPAGVQLEDPEFQASNIMHSINGYVFDSLQLSVCLHEVAYWYILSIGAQTDFLSVFFSGYTFKHKMVYEDTLTLFPFSGETVFMSMENPGLWILGCHNSDFRNRGMTALLKVSSCDKNTGDYYEDSYEDISAYLLSKNNAIEPRSFSQNGAPSPAGSPTSTEEGTSESATPESGPGSEPATSGSETPGTSESATPESGPGTSTEPSEGSAPGTSTEPSEGSAPGTSTEPSEGSAPGTSTEPSEGSAPGTSTEPSEGSAPGTSTEPSEGSAPGSPAGSPTSTEEGTSTEPSEGSAPGASSPPVLKRHQAEITRTTLQSDQEEIDYDDTISVEMKKEDFDIYDEDENQSPRSFQKKTRHYFIAAVERLWDYGMSSSPHVLRNRAQGAPTSESATPESGPGSEPATSGSETPGTSESATPESGPGSEPATSGSETPGTSESATPESGPGTSTEPSEGSAPGTSESATPESGPGSPAGSPTSTEEGSPAGSPTSTEEGSPAGSPTSTEEGTSESATPESGPGTSTEPSEGSAPGASSRAQSGSVPQFKKVVFQEFTDGSFTQPLYRGELNEHLGLLGPYIRAEVEDNIMVTFRNQASRPYSFYSSLISYEEDQRQGAEPRKNFVKPNETKTYFWKVQHHMAPTKDEFDCKAWAYFSDVDLEKDVHSGLIGPLLVCHTNTLNPAHGRQVTVQEFALFFTIFDETKSWYFTENMERNCRAPCNIQMEDPTFKENYRFHAINGYIMDTLPGLVMAQDQRIRWYLLSMGSNENIHSIHFSGHVFTVRKKEEYKMALYNLYPGVFETVEMLPSKAGIWRVECLIGEHLHAGMSTLFLVYSNKCQTPLGMASGHIRDFQITASGQYGQWAPKLARLHYSGSINAWSTKEPFSWIKVDLLAPMIIHGIKTQGARQKFSSLYISQFIIMYSLDGKKWQTYRGNSTGTLMVFFGNVDSSGIKHNIFNPPIIARYIRLHPTHYSIRSTLRMELMGCDLNSCSMPLGMESKAISDAQITASSYFTNMFATWSPSKARLHLQGRSNAWRPQVNNPKEWLQVDFQKTMKVTGVTTQGVKSLLTSMYVKEFLISSSQDGHQWTLFFQNGKVKVFQGNQDSFTPVVNSLDPPLLTRYLRIHPQSWVHQIALRMEVLGCEAQDLYGAPGTSESATPESGPGSEPATSGSETPGTSESATPESGPGSEPATSGSETPGTSESATPESGPGTSTEPSEGSAPGSPAGSPTSTEEGTSESATPESGPGSEPATSGSETPGTSESATPESGPGSPAGSPTSTEEGSPAGSPTSTEEGTSTEPSEGSAPGTSESATPESGPGTSESATPESGPGTSESATPESGPGSEPATSGSETPGSEPATSGSETPGSPAGSPTSTEEGTSTEPSEGSAPGTSTEPSEGSAPGSEPATSGSETPGTSESATPESGPGTSTEPSEGSAPASSEQKLISEEDLSPATGHHHHHH

SEQ ID NO: 1232 - DNA, 6621 bp, synthetic construct
  misc_feature 1..6621: note = Description of Artificial Sequence: Synthetic polynucleotide
  source 1..6621: mol_type = other DNA
gccaccagaagatactacctgggtgcagtggaactgtcatgggactatatgcaaagtgatctcggtgagctgcctgtggacgcaagatttcctcctagagtgccaaaatcttttccattcggcgcgccaggctccagcccctccgcgagcacgggaaccggaccaggttcgtcaccctcagcatcaacggggacgggaccgggggcgtcaccaggaacgtcctccaccggctcgccgggtgcatcacccggaacgtcatcgaccggatcgccagggagctcgacgccatcaggcgcaacaggatcacctggctcaagccctagcgcgtcaaccggcacgggtccgggtgcctcccctggcacgtccagcaccggatcacccggatcgagcccatccgcctcaaccggaaccggacccggtacaccagggtcgggaacagcctcctcgtcaccaggctcctcaaccccctcgggagccacgggttcgcccggttcgtcaacgccttccggagcaactggtagccccggagcatcgccaggaacttcgagcacggggtcgcccgcctcgagcaacacctcagtcgtgtacaaaaagactctgtttgtagaattcacggatcaccttttcaacatcgctaagccaaggccaccctggatgggtctgctaggtcctaccatccaggctgaggtttatgatacagtggtcattacacttaagaacatggcttcccatcctgtcagtcttcatgctgttggtgtatcctactggaaagcttctgagggagctgaatatgatgatcagaccagtcaaagggagaaagaagatgataaagtcttccctggtggaagccatacatatgtctggcaggtcctgaaagagaatggtccaatggcctctgacccactgtgccttacctactcatatctttctcatgtggacctggtaaaagacttgaattcaggcctcattggagccctactagtatgtagagaagggagtctggccaaggaaaagacacagaccttgcacaaatttatactactttttgctgtatttgatgaagggaaaagttggcactcagaaacaaagaactccttgatgcaggatagggatgctgcatctgctcgggcctggcctaaaatgcacacagtcaatggttatgtaaacaggtctctgccaggtctgattggatgccacaggaaatcagtctattggcatgtgattggaatgggcaccactcctgaagtgcactcaatattcctcgaaggtcacacatttcttgtgaggaaccatcgccaggctagcttggaaatctcgccaataactttccttactgctcaaacactcttgatggaccttggacagtttctactgttttgtcatatctcttcccaccaacatgatggcatggaagcttatgtcaaagtagacagctgtccagaggaaccccaactacgaatgaaaaataatgaagaagcggaagactatgatgatgatcttactgattctgaaatggatgtggtcaggtttgatgatgacaactctccttcctttatccaaattcgctcagttgccaagaagcatcctaaaacttgggtacattacattgctgctgaagaggaggactgggactatgctcccttagtcctcgcccccgatgacagaagttataaaagtcaatatttgaacaatggccctcagcggattggtaggaagtacaaaaaagtccgatttatggcatacacagatgaaacctttaagactcgtgaagctattcagcatgaatcaggaatcttgggacctttactttatggggaagttggagacacactgttgattatatttaagaatcaagcaagcagaccatataacatctaccctcacggaatcactgatgtccgtcctttgtattcaaggagattaccaaaaggtgtaaaacatttgaaggattttccaattctgccaggagaaatattcaaatataaatggacagtgactgtagaagatgggccaactaaatcagatcctcggtgcctgacccgctattactctagtttcgttaatatggagagagatctagcttcaggactcattggccctctcctcatctgctacaaagaatctgtagatcaaagaggaaaccagataatgtcagacaagaggaatgtcatcctgttttctgtatttgatgagaaccgaagctggtacctcacagagaatatacaacgctttctccccaatccagctggagtgcagcttgaggatccagagttccaagcctccaacatcatgcacagcatcaatggctatgtttttgatagtttgcagttgtcagtttgtttgcatgaggtggcatactggtacattctaagcattggagcacagactgacttcctttctgtcttcttctctggatataccttcaaacacaaaatggtctatgaagacacactcaccctattcccattctcaggagaaactgtcttcatgtcgatggaaaacccaggtctatggattctggggtgccacaactcagactttcggaacagaggcatgaccgccttactgaaggtttctagttgtgacaagaacactggtgattattacgaggacagttatgaagatatttcagcatacttgctgagtaaaaacaatgccattgaaccaagaagcttctctcaaaacggcgcgccaagtcccgctggaagcccaactagcaccgaagaggggacctcagagtccgccacccccgagtccggccctggctctgagcctgccactagcggctccgagactcctggcacatccgaaagcgctacacccgagagtggacccggcacctctaccgagcccagtgagggctccgcccctggaacaagcaccgagcccagcgaaggcagcgccccagggacctccacagagcccagtgaaggcagtgctcctggcaccagcaccgaaccaagcgagggctctgcacccgggacctccaccgagccaagcgaaggctctgcccctggcacttccaccgagcccagcgaaggcagcgcccctgggagccccgctggctctcccaccagcactgaggagggcacatctaccgaaccaagtgaaggctctgcaccaggtgcctcgagcccaccagtcttgaaacgccatcaagctgaaataactcgtactactcttcagtcagatcaagaggaaatcgattatgatgataccatatcagttgaaatgaagaaggaagattttgacatttatgatgaggatgaaaatcagagcccccgcagctttcaaaagaaaacacgacactattttattgctgcagtggagaggctctgggattatgggatgagtagctccccacatgttctaagaaacagggctcagggcgcgccaacgtccgaaagtgctacccctgagtcaggccctggtagtgagcctgccacaagcggaagcgaaactccggggacctcagagtctgccactcccgaatcggggccaggctctgaaccggccacttcagggagcgaaacaccaggaacatcggagagcgctaccccggagagcgggccaggaactagtactgagcctagcgagggaagtgcacctggtacaagcgagtccgccacacccgagtctggccctggctctccagcgggctcacccacgagcactgaagagggctctcccgctggcagcccaacgtcgacagaagaaggatcaccagcaggctcccccacatcaacagaggagggtacatcagaatctgctactcccgagagtggacccggtacctccactgagcccagcgaggggagtgcaccaggtgcctcgagcagggctcagagtggcagtgtccctcagttcaagaaagttgttttccaggaatttactgatggctcctttactcagcccttataccgtggagaactaaatgaacatttgggactcctggggccatatataagagcagaagttgaagataatatcatggtaactttcagaaatcaggcctctcgtccctattccttctattctagccttatttcttatgaggaagatcagaggcaaggagcagaacctagaaaaaactttgtcaagcctaatgaaaccaaaacttacttttggaaagtgcaacatcatatggcacccactaaagatgagtttgactgcaaagcctgggcttatttctctgatgttgacctggaaaaagatgtgcactcaggcctgattggaccccttctggtctgccacactaacacactgaaccctgctcatgggagacaagtgacagtacaggaatttgctctgtttttcaccatctttgatgagaccaaaagctggtacttcactgaaaatatggaaagaaactgcagggctccctgcaatatccagatggaagatcccacttttaaagagaattatcgcttccatgcaatcaatggctacataatggatacactacctggcttagtaatggctcaggatcaaaggattcgatggtatctgctcagcatgggcagcaatgaaaacatccattctattcatttcagtggacatgtgttcactgtacgaaaaaaagaggagtataaaatggcactgtacaatctctatccaggtgtttttgagacagtggaaatgttaccatccaaagctggaatttggcgggtggaatgccttattggcgagcatctacatgctgggatgagcacactttttctggtgtacagcaataagtgtcagactcccctgggaatggcttctggacacattagagattttcagattacagcttcaggacaatatggacagtgggccccaaagctggccagacttcattattccggatcaatcaatgcctggagcaccaaggagcccttttcttggatcaaggtggatctgttggcaccaatgattattcacggcatcaagacccagggtgcccgtcagaagttctccagcctctacatctctcagtttatcatcatgtatagtcttgatgggaagaagtggcagacttatcgaggaaattccactggaaccttaatggtcttctttggcaatgtggattcatctgggataaaacacaatatttttaaccctccaattattgctcgatacatccgtttgcacccaactcattatagcattcgcagcactcttcgcatggagttgatgggctgtgatttaaatagttgcagcatgccattgggaatggagagtaaagcaatatcagatgcacagattactgcttcatcctactttaccaatatgtttgccacctggtctccttcaaaagctcgacttcacctccaagggaggagtaatgcctggagacctcaggtgaataatccaaaagagtggctgcaagtggacttccagaagacaatgaaagtcacaggagtaactactcagggagtaaaatctctgcttaccagcatgtatgtgaaggagttcctcatctccagcagtcaagatggccatcagtggactctcttttttcagaatggcaaagtaaaggtttttcagggaaatcaagactccttcacacctgtggtgaactctctagacccaccgttactgactcgctaccttcgaattcacccccagagttgggtgcaccagattgccctgaggatggaggttctgggctgcgaggcacaggacctctacggcgcgccaggtacctcagagtctgctacccccgagtcagggccaggatcagagccagccacctccgggtctgagacacccgggacttccgagagtgccacccctgagtccggacccgggtccgagcccgccacttccggctccgaaactcccggcacaagcgagagcgctaccccagagtcaggaccaggaacatctacagagccctctgaaggctccgctccagggtccccagccggcagtcccactagcaccgaggagggaacctctgaaagcgccacacccgaatcagggccagggtctgagcctgctaccagcggcagcgagacaccaggcacctctgagtccgccacaccagagtccggacccggatctcccgctgggagccccacctccactgaggagggatctcctgctggctctccaacatctactgaggaaggtacctcaaccgagccatccgagggatcagctcccggcacctcagagtcggcaaccccggagtctggacccggaacttccgaaagtgccacaccagagtccggtcccgggacttcagaatcagcaacacccgagtccggccctgggtctgaacccgccacaagtggtagtgagacaccaggatcagaacctgctacctcagggtcagagacacccggatctccggcaggctcaccaacctccactgaggagggcaccagcacagaaccaagcgagggctccgcacccggaacaagcactgaacccagtgagggttcagcacccggctctgagccggccacaagtggcagtgagacacccggcacttcagagagtgccacccccgagagtggcccaggcactagtaccgagccctctgaaggcagtgcgccagcctcgagcgaacaaaaactcatctcagaagaggatctgtcacctgcaaccggtcatcatcaccatcaccattga

SEQ ID NO: 1233 - protein, 2206 aa, synthetic construct
  REGION 1..2206: note = Description of Artificial Sequence: Synthetic polypeptide
ATRRYYLGAVELSWDYMQSDLGELPVGAPGSSPSASTGTGPGSSPSASTGTGPGASPGTSSTGSPGASPGTSSTGSPGSSTPSGATGSPGSSPSASTGTGPGASPGTSSTGSPGSSPSASTGTGPGTPGSGTASSSPGSSTPSGATGSPGSSTPSGATGSPGASPGTSSTGSPASSDARFPPRVPKSFPFNTSVVYKKTLFVEFTDHLFNIAKPRPPWMGLLGPTIQAEVYDTVVITLKNMASHPVSLHAVGVSYWKASEGAEYDDQTSQREKEDDKVFPGGSHTYVWQVLKENGPMASDPLCLTYSYLSHVDLVKDLNSGLIGALLVCREGSLAKEKTQTLHKFILLFAVFDEGKSWHSETKNSLMQDRDAASARAWPKMHTVNGYVNRSLPGLIGCHRKSVYWHVIGMGTTPEVHSIFLEGHTFLVRNHRQASLEISPITFLTAQTLLMDLGQFLLFCHISSHQHDGMEAYVKVDSCPEEPQLRMKNNEEAEDYDDDLTDSEMDVVRFDDDNSPSFIQIRSVAKKHPKTWVHYIAAEEEDWDYAPLVLAPDDRSYKSQYLNNGPQRIGRKYKKVRFMAYTDETFKTREAIQHESGILGPLLYGEVGDTLLIIFKNQASRPYNIYPHGITDVRPLYSRRLPKGVKHLKDFPILPGEIFKYKWTVTVEDGPTKSDPRCLTRYYSSFVNMERDLASGLIGPLLICYKESVDQRGNQIMSDKRNVILFSVFDENRSWYLTENIQRFLPNPAGVQLEDPEFQASNIMHSINGYVFDSLQLSVCLHEVAYWYILSIGAQTDFLSVFFSGYTFKHKMVYEDTLTLFPFSGETVFMSMENPGLWILGCHNSDFRNRGMTALLKVSSCDKNTGDYYEDSYEDISAYLLSKNNAIEPRSFSQNGAPSPAGSPTSTEEGTSESATPESGPGSEPATSGSETPGTSESATPESGPGTSTEPSEGSAPGTSTEPSEGSAPGTSTEPSEGSAPGTSTEPSEGSAPGTSTEPSEGSAPGTSTEPSEGSAPGSPAGSPTSTEEGTSTEPSEGSAPGASSPPVLKRHQAEITRTTLQSDQEEIDYDDTISVEMKKEDFDIYDEDENQSPRSFQKKTRHYFIAAVERLWDYGMSSSPHVLRNRAQGAPTSESATPESGPGSEPATSGSETPGTSESATPESGPGSEPATSGSETPGTSESATPESGPGTSTEPSEGSAPGTSESATPESGPGSPAGSPTSTEEGSPAGSPTSTEEGSPAGSPTSTEEGTSESATPESGPGTSTEPSEGSAPGASSRAQSGSVPQFKKVVFQEFTDGSFTQPLYRGELNEHLGLLGPYIRAEVEDNIMVTFRNQASRPYSFYSSLISYEEDQRQGAEPRKNFVKPNETKTYFWKVQHHMAPTKDEFDCKAWAYFSDVDLEKDVHSGLIGPLLVCHTNTLNPAHGRQVTVQEFALFFTIFDETKSWYFTENMERNCRAPCNIQMEDPTFKENYRFHAINGYIMDTLPGLVMAQDQRIRWYLLSMGSNENIHSIHFSGHVFTVRKKEEYKMALYNLYPGVFETVEMLPSKAGIWRVECLIGEHLHAGMSTLFLVYSNKCQTPLGMASGHIRDFQITASGQYGQWAPKLARLHYSGSINAWSTKEPFSWIKVDLLAPMIIHGIKTQGARQKFSSLYISQFIIMYSLDGKKWQTYRGNSTGTLMVFFGNVDSSGIKHNIFNPPIIARYIRLHPTHYSIRSTLRMELMGCDLNSCSMPLGMESKAISDAQITASSYFTNMFATWSPSKARLHLQGRSNAWRPQVNNPKEWLQVDFQKTMKVTGVTTQGVKSLLTSMYVKEFLISSSQDGHQWTLFFQNGKVKVFQGNQDSFTPVVNSLDPPLLTRYLRIHPQSWVHQIALRMEVLGCEAQDLYGAPGTSESATPESGPGSEPATSGSETPGTSESATPESGPGSEPATSGSETPGTSESATPESGPGTSTEPSEGSAPGSPAGSPTSTEEGTSESATPESGPGSEPATSGSETPGTSESATPESGPGSPAGSPTSTEEGSPAGSPTSTEEGTSTEPSEGSAPGTSESATPESGPGTSESATPESGPGTSESATPESGPGSEPATSGSETPGSEPATSGSETPGSPAGSPTSTEEGTSTEPSEGSAPGTSTEPSEGSAPGSEPATSGSETPGTSESATPESGPGTSTEPSEGSAPASSEQKLISEEDLSPATGHHHHHH

SEQ ID NO: 1234 - DNA, 6621 bp, synthetic construct
  misc_feature 1..6621: note = Description of Artificial Sequence: Synthetic polynucleotide
  source 1..6621: mol_type = other DNA
gccaccagaagatactacctgggtgcagtggaactgtcatgggactatatgcaaagtgatctcggtgagctgcctgtgggcgcgccaggctccagcccctccgcgagcacgggaaccggaccaggttcgtcaccctcagcatcaacggggacgggaccgggggcgtcaccaggaacgtcctccaccggctcgccgggtgcatcacccggaacgtcatcgaccggatcgccagggagctcgacgccatcaggcgcaacaggatcacctggctcaagccctagcgcgtcaaccggcacgggtccgggtgcctcccctggcacgtccagcaccggatcacccggatcgagcccatccgcctcaaccggaaccggacccggtacaccagggtcgggaacagcctcctcgtcaccaggctcctcaaccccctcgggagccacgggttcgcccggttcgtcaacgccttccggagcaactggtagccccggagcatcgccaggaacttcgagcacggggtcgcccgcctcgagcgacgcaagatttcctcctagagtgccaaaatcttttccattcaacacctcagtcgtgtacaaaaagactctgtttgtagaattcacggatcaccttttcaacatcgctaagccaaggccaccctggatgggtctgctaggtcctaccatccaggctgaggtttatgatacagtggtcattacacttaagaacatggcttcccatcctgtcagtcttcatgctgttggtgtatcctactggaaagcttctgagggagctgaatatgatgatcagaccagtcaaagggagaaagaagatgataaagtcttccctggtggaagccatacatatgtctggcaggtcctgaaagagaatggtccaatggcctctgacccactgtgccttacctactcatatctttctcatgtggacctggtaaaagacttgaattcaggcctcattggagccctactagtatgtagagaagggagtctggccaaggaaaagacacagaccttgcacaaatttatactactttttgctgtatttgatgaagggaaaagttggcactcagaaacaaagaactccttgatgcaggatagggatgctgcatctgctcgggcctggcctaaaatgcacacagtcaatggttatgtaaacaggtctctgccaggtctgattggatgccacaggaaatcagtctattggcatgtgattggaatgggcaccactcctgaagtgcactcaatattcctcgaaggtcacacatttcttgtgaggaaccatcgccaggctagcttggaaatctcgccaataactttccttactgctcaaacactcttgatggaccttggacagtttctactgttttgtcatatctcttcccaccaacatgatggcatggaagcttatgtcaaagtagacagctgtccagaggaaccccaactacgaatgaaaaataatgaagaagcggaagactatgatgatgatcttactgattctgaaatggatgtggtcaggtttgatgatgacaactctccttcctttatccaaattcgctcagttgccaagaagcatcctaaaacttgggtacattacattgctgctgaagaggaggactgggactatgctcccttagtcctcgcccccgatgacagaagttataaaagtcaatatttgaacaatggccctcagcggattggtaggaagtacaaaaaagtccgatttatggcatacacagatgaaacctttaagactcgtgaagctattcagcatgaatcaggaatcttgggacctttactttatggggaagttggagacacactgttgattatatttaagaatcaagcaagcagaccatataacatctaccctcacggaatcactgatgtccgtcctttgtattcaaggagattaccaaaaggtgtaaaacatttgaaggattttccaattctgccaggagaaatattcaaatataaatggacagtgactgtagaagatgggccaactaaatcagatcctcggtgcctgacccgctattactctagtttcgttaatatggagagagatctagcttcaggactcattggccctctcctcatctgctacaaagaatctgtagatcaaagaggaaaccagataatgtcagacaagaggaatgtcatcctgttttctgtatttgatgagaaccgaagctggtacctcacagagaatatacaacgctttctccccaatccagctggagtgcagcttgaggatccagagttccaagcctccaacatcatgcacagcatcaatggctatgtttttgatagtttgcagttgtcagtttgtttgcatgaggtggcatactggtacattctaagcattggagcacagactgacttcctttctgtcttcttctctggatataccttcaaacacaaaatggtctatgaagacacactcaccctattcccattctcaggagaaactgtcttcatgtcgatggaaaacccaggtctatggattctggggtgccacaactcagactttcggaacagaggcatgaccgccttactgaaggtttctagttgtgacaagaacactggtgattattacgaggacagttatgaagatatttcagcatacttgctgagtaaaaacaatgccattgaaccaagaagcttctctcaaaacggcgcgccaagtcccgctggaagcccaactagcaccgaagaggggacctcagagtccgccacccccgagtccggccctggctctgagcctgccactagcggctccgagactcctggcacatccgaaagcgctacacccgagagtggacccggcacctctaccgagcccagtgagggctccgcccctggaacaagcaccgagcccagcgaaggcagcgccccagggacctccacagagcccagtgaaggcagtgctcctggcaccagcaccgaaccaagcgagggctctgcacccgggacctccaccgagccaagcgaaggctctgcccctggcacttccaccgagcccagcgaaggcagcgcccctgggagccccgctggctctcccaccagcactgaggagggcacatctaccgaaccaagtgaaggctctgcaccaggtgcctcgagcccaccagtcttgaaacgccatcaagctgaaataactcgtactactcttcagtcagatcaagaggaaatcgattatgatgataccatatcagttgaaatgaagaaggaagattttgacatttatgatgaggatgaaaatcagagcccccgcagctttcaaaagaaaacacgacactattttattgctgcagtggagaggctctgggattatgggatgagtagctccccacatgttctaagaaacagggctcagggcgcgccaacgtccgaaagtgctacccctgagtcaggccctggtagtgagcctgccacaagcggaagcgaaactccggggacctcagagtctgccactcccgaatcggggccaggctctgaaccggccacttcagggagcgaaacaccaggaacatcggagagcgctaccccggagagcgggccaggaactagtactgagcctagcgagggaagtgcacctggtacaagcgagtccgccacacccgagtctggccctggctctccagcgggctcacccacgagcactgaagagggctctcccgctggcagcccaacgtcgacagaagaaggatcaccagcaggctcccccacatcaacagaggagggtacatcagaatctgctactcccgagagtggacccggtacctccactgagcccagcgaggggagtgcaccaggtgcctcgagcagggctcagagtggcagtgtccctcagttcaagaaagttgttttccaggaatttactgatggctcctttactcagcccttataccgtggagaactaaatgaacatttgggactcctggggccatatataagagcagaagttgaagataatatcatggtaactttcagaaatcaggcctctcgtccctattccttctattctagccttatttcttatgaggaagatcagaggcaaggagcagaacctagaaaaaactttgtcaagcctaatgaaaccaaaacttacttttggaaagtgcaacatcatatggcacccactaaagatgagtttgactgcaaagcctgggcttatttctctgatgttgacctggaaaaagatgtgcactcaggcctgattggaccccttctggtctgccacactaacacactgaaccctgctcatgggagacaagtgacagtacaggaatttgctctgtttttcaccatctttgatgagaccaaaagctggtacttcactgaaaatatggaaagaaactgcagggctccctgcaatatccagatggaagatcccacttttaaagagaattatcgcttccatgcaatcaatggctacataatggatacactacctggcttagtaatggctcaggatcaaaggattcgatggtatctgctcagcatgggcagcaatgaaaacatccattctattcatttcagtggacatgtgttcactgtacgaaaaaaagaggagtataaaatggcactgtacaatctctatccaggtgtttttgagacagtggaaatgttaccatccaaagctggaatttggcgggtggaatgccttattggcgagcatctacatgctgggatgagcacactttttctggtgtacagcaataagtgtcagactcccctgggaatggcttctggacacattagagattttcagattacagcttcaggacaatatggacagtgggccccaaagctggccagacttcattattccggatcaatcaatgcctggagcaccaaggagcccttttcttggatcaaggtggatctgttggcaccaatgattattcacggcatcaagacccagggtgcccgtcagaagttctccagcctctacatctctcagtttatcatcatgtatagtcttgatgggaagaagtggcagacttatcgaggaaattccactggaaccttaatggtcttctttggcaatgtggattcatctgggataaaacacaatatttttaaccctccaattattgctcgatacatccgtttgcacccaactcattatagcattcgcagcactcttcgcatggagttgatgggctgtgatttaaatagttgcagcatgccattgggaatggagagtaaagcaatatcagatgcacagattactgcttcatcctactttaccaatatgtttgccacctggtctccttcaaaagctcgacttcacctccaagggaggagtaatgcctggagacctcaggtgaataatccaaaagagtggctgcaagtggacttccagaagacaatgaaagtcacaggagtaactactcagggagtaaaatctctgcttaccagcatgtatgtgaaggagttcctcatctccagcagtcaagatggccatcagtggactctcttttttcagaatggcaaagtaaaggtttttcagggaaatcaagactccttcacacctgtggtgaactctctagacccaccgttactgactcgctaccttcgaattcacccccagagttgggtgcaccagattgccctgaggatggaggttctgggctgcgaggcacaggacctctacggcgcgccaggtacctcagagtctgctacccccgagtcagggccaggatcagagccagccacctccgggtctgagacacccgggacttccgagagtgccacccctgagtccggacccgggtccgagcccgccacttccggctccgaaactcccggcacaagcgagagcgctaccccagagtcaggaccaggaacatctacagagccctctgaaggctccgctccagggtccccagccggcagtcccactagcaccgaggagggaacctctgaaagcgccacacccgaatcagggccagggtctgagcctgctaccagcggcagcgagacaccaggcacctctgagtccgccacaccagagtccggacccggatctcccgctgggagccccacctccactgaggagggatctcctgctggctctccaacatctactgaggaaggtacctcaaccgagccatccgagggatcagctcccggcacctcagagtcggcaaccccggagtctggacccggaacttccgaaagtgccacaccagagtccggtcccgggacttcagaatcagcaacacccgagtccggccctgggtctgaacccgccacaagtggtagtgagacaccaggatcagaacctgctacctcagggtcagagacacccggatctccggcaggctcaccaacctccactgaggagggcaccagcacagaaccaagcgagggctccgcacccggaacaagcactgaacccagtgagggttcagcacccggctctgagccggccacaagtggcagtgagacacccggcacttcagagagtgccacccccgagagtggcccaggcactagtaccgagccctctgaaggcagtgcgccagcctcgagcgaacaaaaactcatctcagaagaggatctgtcacctgcaaccggtcatcatcaccatcaccattga

SEQ ID NO: 1235 - protein, 2206 aa, synthetic construct
  REGION 1..2206: note = Description of Artificial Sequence: Synthetic polypeptide
ATRRYYLGAVELSWDYMQGAPTSESATPESGPGSEPATSGSETPGTSESATPESGPGSEPATSGSETPGTSESATPESGPGTSTEPSEGSAPGSPAGSPTSTEEGTSESATPESGPGSEPATSGSETPGTSESATPESGPGSPAGSPTSTEEGSPAGSPTSTEEGASSSDLGELPVDARFPPRVPKSFPFNTSVVYKKTLFVEFTDHLFNIAKPRPPWMGLLGPTIQAEVYDTVVITLKNMASHPVSLHAVGVSYWKASEGAEYDDQTSQREKEDDKVFPGGSHTYVWQVLKENGPMASDPLCLTYSYLSHVDLVKDLNSGLIGALLVCREGSLAKEKTQTLHKFILLFAVFDEGKSWHSETKNSLMQDRDAASARAWPKMHTVNGYVNRSLPGLIGCHRKSVYWHVIGMGTTPEVHSIFLEGHTFLVRNHRQASLEISPITFLTAQTLLMDLGQFLLFCHISSHQHDGMEAYVKVDSCPEEPQLRMKNNEEAEDYDDDLTDSEMDVVRFDDDNSPSFIQIRSVAKKHPKTWVHYIAAEEEDWDYAPLVLAPDDRSYKSQYLNNGPQRIGRKYKKVRFMAYTDETFKTREAIQHESGILGPLLYGEVGDTLLIIFKNQASRPYNIYPHGITDVRPLYSRRLPKGVKHLKDFPILPGEIFKYKWTVTVEDGPTKSDPRCLTRYYSSFVNMERDLASGLIGPLLICYKESVDQRGNQIMSDKRNVILFSVFDENRSWYLTENIQRFLPNPAGVQLEDPEFQASNIMHSINGYVFDSLQLSVCLHEVAYWYILSIGAQTDFLSVFFSGYTFKHKMVYEDTLTLFPFSGETVFMSMENPGLWILGCHNSDFRNRGMTALLKVSSCDKNTGDYYEDSYEDISAYLLSKNNAIEPRSFSQNGAPSPAGSPTSTEEGTSESATPESGPGSEPATSGSETPGTSESATPESGPGTSTEPSEGSAPGTSTEPSEGSAPGTSTEPSEGSAPGTSTEPSEGSAPGTSTEPSEGSAPGTSTEPSEGSAPGSPAGSPTSTEEGTSTEPSEGSAPGASSPPVLKRHQAEITRTTLQSDQEEIDYDDTISVEMKKEDFDIYDEDENQSPRSFQKKTRHYFIAAVERLWDYGMSSSPHVLRNRAQGAPTSESATPESGPGSEPATSGSETPGTSESATPESGPGSEPATSGSETPGTSESATPESGPGTSTEPSEGSAPGTSESATPESGPGSPAGSPTSTEEGSPAGSPTSTEEGSPAGSPTSTEEGTSESATPESGPGTSTEPSEGSAPGASSRAQSGSVPQFKKVVFQEFTDGSFTQPLYRGELNEHLGLLGPYIRAEVEDNIMVTFRNQASRPYSFYSSLISYEEDQRQGAEPRKNFVKPNETKTYFWKVQHHMAPTKDEFDCKAWAYFSDVDLEKDVHSGLIGPLLVCHTNTLNPAHGRQVTVQEFALFFTIFDETKSWYFTENMERNCRAPCNIQMEDPTFKENYRFHAINGYIMDTLPGLVMAQDQRIRWYLLSMGSNENIHSIHFSGHVFTVRKKEEYKMALYNLYPGVFETVEMLPSKAGIWRVECLIGEHLHAGMSTLFLVYSNKCQTPLGMASGHIRDFQITASGQYGQWAPKLARLHYSGSINAWSTKEPFSWIKVDLLAPMIIHGIKTQGARQKFSSLYISQFIIMYSLDGKKWQTYRGNSTGTLMVFFGNVDSSGIKHNIFNPPIIARYIRLHPTHYSIRSTLRMELMGCDLNSCSMPLGMESKAISDAQITASSYFTNMFATWSPSKARLHLQGRSNAWRPQVNNPKEWLQVDFQKTMKVTGVTTQGVKSLLTSMYVKEFLISSSQDGHQWTLFFQNGKVKVFQGNQDSFTPVVNSLDPPLLTRYLRIHPQSWVHQIALRMEVLGCEAQDLYGAPGTSESATPESGPGSEPATSGSETPGTSESATPESGPGSEPATSGSETPGTSESATPESGPGTSTEPSEGSAPGSPAGSPTSTEEGTSESATPESGPGSEPATSGSETPGTSESATPESGPGSPAGSPTSTEEGSPAGSPTSTEEGTSTEPSEGSAPGTSESATPESGPGTSESATPESGPGTSESATPESGPGSEPATSGSETPGSEPATSGSETPGSPAGSPTSTEEGTSTEPSEGSAPGTSTEPSEGSAPGSEPATSGSETPGTSESATPESGPGTSTEPSEGSAPASSEQKLISEEDLSPATGHHHHHH

SEQ ID NO: 1236 - DNA, 6621 bp, synthetic construct
  misc_feature 1..6621: note = Description of Artificial Sequence: Synthetic polynucleotide
  source 1..6621: mol_type = other DNA
gccaccagaagatactacctgggtgcagtggaactgtcatgggactatatgcaaggcgcgccaacatcagagagcgccacccctgaaagtggtcccgggagcgagccagccacatctgggtcggaaacgccaggcacaagtgagtctgcaactcccgagtccggacctggctccgagcctgccactagcggctccgagactccgggaacttccgagagcgctacaccagaaagcggacccggaaccagtaccgaacctagcgagggctctgctccgggcagcccagccggctctcctacatccacggaggagggcacttccgaatccgccaccccggagtcagggccaggatctgaacccgctacctcaggcagtgagacgccaggaacgagcgagtccgctacaccggagagtgggccagggagccctgctggatctcctacgtccactgaggaagggtcaccagcgggctcgcccaccagcactgaagaaggtgcctcgagcagtgatctcggtgagctgcctgtggacgcaagatttcctcctagagtgccaaaatcttttccattcaacacctcagtcgtgtacaaaaagactctgtttgtagaattcacggatcaccttttcaacatcgctaagccaaggccaccctggatgggtctgctaggtcctaccatccaggctgaggtttatgatacagtggtcattacacttaagaacatggcttcccatcctgtcagtcttcatgctgttggtgtatcctactggaaagcttctgagggagctgaatatgatgatcagaccagtcaaagggagaaagaagatgataaagtcttccctggtggaagccatacatatgtctggcaggtcctgaaagagaatggtccaatggcctctgacccactgtgccttacctactcatatctttctcatgtggacctggtaaaagacttgaattcaggcctcattggagccctactagtatgtagagaagggagtctggccaaggaaaagacacagaccttgcacaaatttatactactttttgctgtatttgatgaagggaaaagttggcactcagaaacaaagaactccttgatgcaggatagggatgctgcatctgctcgggcctggcctaaaatgcacacagtcaatggttatgtaaacaggtctctgccaggtctgattggatgccacaggaaatcagtctattggcatgtgattggaatgggcaccactcctgaagtgcactcaatattcctcgaaggtcacacatttcttgtgaggaaccatcgccaggctagcttggaaatctcgccaataactttccttactgctcaaacactcttgatggaccttggacagtttctactgttttgtcatatctcttcccaccaacatgatggcatggaagcttatgtcaaagtagacagctgtccagaggaaccccaactacgaatgaaaaataatgaagaagcggaagactatgatgatgatcttactgattctgaaatggatgtggtcaggtttgatgatgacaactctccttcctttatccaaattcgctcagttgccaagaagcatcctaaaacttgggtacattacattgctgctgaagaggaggactgggactatgctcccttagtcctcgcccccgatgacagaagttataaaagtcaatatttgaacaatggccctcagcggattggtaggaagtacaaaaaagtccgatttatggcatacacagatgaaacctttaagactcgtgaagctattcagcatgaatcaggaatcttgggacctttactttatggggaagttggagacacactgttgattatatttaagaatcaagcaagcagaccatataacatctaccctcacggaatcactgatgtccgtcctttgtattcaaggagattaccaaaaggtgtaaaacatttgaaggattttccaattctgccaggagaaatattcaaatataaatggacagtgactgtagaagatgggccaactaaatcagatcctcggtgcctgacccgctattactctagtttcgttaatatggagagagatctagcttcaggactcattggccctctcctcatctgctacaaagaatctgtagatcaaagaggaaaccagataatgtcagacaagaggaatgtcatcctgttttctgtatttgatgagaaccgaagctggtacctcacagagaatatacaacgctttctccccaatccagctggagtgcagcttgaggatccagagttccaagcctccaacatcatgcacagcatcaatggctatgtttttgatagtttgcagttgtcagtttgtttgcatgaggtggcatactggtacattctaagcattggagcacagactgacttcctttctgtcttcttctctggatataccttcaaacacaaaatggtctatgaagacacactcaccctattcccattctcaggagaaactgtcttcatgtcgatggaaaacccaggtctatggattctggggtgccacaactcagactttcggaacagaggcatgaccgccttactgaaggtttctagttgtgacaagaacactggtgattattacgaggacagttatgaagatatttcagcatacttgctgagtaaaaacaatgccattgaaccaagaagcttctctcaaaacggcgcgccaagtcccgctggaagcccaactagcaccgaagaggggacctcagagtccgccacccccgagtccggccctggctctgagcctgccactagcggctccgagactcctggcacatccgaaagcgctacacccgagagtggacccggcacctctaccgagcccagtgagggctccgcccctggaacaagcaccgagcccagcgaaggcagcgccccagggacctccacagagcccagtgaaggcagtgctcctggcaccagcaccgaaccaagcgagggctctgcacccgggacctccaccgagccaagcgaaggctctgcccctggcacttccaccgagcccagcgaaggcagcgcccctgggagccccgctggctctcccaccagcactgaggagggcacatctaccgaaccaagtgaaggctctgcaccaggtgcctcgagcccaccagtcttgaaacgccatcaagctgaaataactcgtactactcttcagtcagatcaagaggaaatcgattatgatgataccatatcagttgaaatgaagaaggaagattttgacatttatgatgaggatgaaaatcagagcccccgcagctttcaaaagaaaacacgacactattttattgctgcagtggagaggctctgggattatgggatgagtagctccccacatgttctaagaaacagggctcagggcgcgccaacgtccgaaagtgctacccctgagtcaggccctggtagtgagcctgccacaagcggaagcgaaactccggggacctcagagtctgccactcccgaatcggggccaggctctgaaccggccacttcagggagcgaaacaccaggaacatcggagagcgctaccccggagagcgggccaggaactagtactgagcctagcgagggaagtgcacctggtacaagcgagtccgccacacccgagtctggccctggctctccagcgggctcacccacgagcactgaagagggctctcccgctggcagcccaacgtcgacagaagaaggatcaccagcaggctcccccacatcaacagaggagggtacatcagaatctgctactcccgagagtggacccggtacctccactgagcccagcgaggggagtgcaccaggtgcctcgagcagggctcagagtggcagtgtccctcagttcaagaaagttgttttccaggaatttactgatggctcctttactcagcccttataccgtggagaactaaatgaacatttgggactcctggggccatatataagagcagaagttgaagataatatcatggtaactttcagaaatcaggcctctcgtccctattccttctattctagccttatttcttatgaggaagatcagaggcaaggagcagaacctagaaaaaactttgtcaagcctaatgaaaccaaaacttacttttggaaagtgcaacatcatatggcacccactaaagatgagtttgactgcaaagcctgggcttatttctctgatgttgacctggaaaaagatgtgcactcaggcctgattggaccccttctggtctgccacactaacacactgaaccctgctcatgggagacaagtgacagtacaggaatttgctctgtttttcaccatctttgatgagaccaaaagctggtacttcactgaaaatatggaaagaaactgcagggctccctgcaatatccagatggaagatcccacttttaaagagaattatcgcttccatgcaatcaatggctacataatggatacactacctggcttagtaatggctcaggatcaaaggattcgatggtatctgctcagcatgggcagcaatgaaaacatccattctattcatttcagtggacatgtgttcactgtacgaaaaaaagaggagtataaaatggcactgtacaatctctatccaggtgtttttgagacagtggaaatgttaccatccaaagctggaatttggcgggtggaatgccttattggcgagcatctacatgctgggatgagcacactttttctggtgtacagcaataagtgtcagactcccctgggaatggcttctggacacattagagattttcagattacagcttcaggacaatatggacagtgggccccaaagctggccagacttcattattccggatcaatcaatgcctggagcaccaaggagcccttttcttggatcaaggtggatctgttggcaccaatgattattcacggcatcaagacccagggtgcccgtcagaagttctccagcctctacatctctcagtttatcatcatgtatagtcttgatgggaagaagtggcagacttatcgaggaaattccactggaaccttaatggtcttctttggcaatgtggattcatctgggataaaacacaatatttttaaccctccaattattgctcgatacatccgtttgcacccaactcattatagcattcgcagcactcttcgcatggagttgatgggctgtgatttaaatagttgcagcatgccattgggaatggagagtaaagcaatatcagatgcacagattactgcttcatcctactttaccaatatgtttgccacctggtctccttcaaaagctcgacttcacctccaagggaggagtaatgcctggagacctcaggtgaataatccaaaagagtggctgcaagtggacttccagaagacaatgaaagtcacaggagtaactactcagggagtaaaatctctgcttaccagcatgtatgtgaaggagttcctcatctccagcagtcaagatggccatcagtggactctcttttttcagaatggcaaagtaaaggtttttcagggaaatcaagactccttcacacctgtggtgaactctctagacccaccgttactgactcgctaccttcgaattcacccccagagttgggtgcaccagattgccctgaggatggaggttctgggctgcgaggcacaggacctctacggcgcgccaggtacctcagagtctgctacccccgagtcagggccaggatcagagccagccacctccgggtctgagacacccgggacttccgagagtgccacccctgagtccggacccgggtccgagcccgccacttccggctccgaaactcccggcacaagcgagagcgctaccccagagtcaggaccaggaacatctacagagccctctgaaggctccgctccagggtccccagccggcagtcccactagcaccgaggagggaacctctgaaagcgccacacccgaatcagggccagggtctgagcctgctaccagcggcagcgagacaccaggcacctctgagtccgccacaccagagtccggacccggatctcccgctgggagccccacctccactgaggagggatctcctgctggctctccaacatctactgaggaaggtacctcaaccgagccatccgagggatcagctcccggcacctcagagtcggcaaccccggagtctggacccggaacttccgaaagtgccacaccagagtccggtcccgggacttcagaatcagcaacacccgagtccggccctgggtctgaacccgccacaagtggtagtgagacaccaggatcagaacctgctacctcagggtcagagacacccggatctccggcaggctcaccaacctccactgaggagggcaccagcacagaaccaagcgagggctccgcacccggaacaagcactgaacccagtgagggttcagcacccggctctgagccggccacaagtggcagtgagacacccggcacttcagagagtgccacccccgagagtggcccaggcactagtaccgagccctctgaaggcagtgcgccagcctcgagcgaacaaaaactcatctcagaagaggatctgtcacctgcaaccggtcatcatcaccatcaccattga

SEQ ID NO: 1237 - protein, 2206 aa, synthetic construct
  REGION 1..2206: note = Description of Artificial Sequence: Synthetic polypeptide
ATRRYYLGAVELSWDYMQGAPGSSPSASTGTGPGSSPSASTGTGPGASPGTSSTGSPGASPGTSSTGSPGSSTPSGATGSPGSSPSASTGTGPGASPGTSSTGSPGSSPSASTGTGPGTPGSGTASSSPGSSTPSGATGSPGSSTPSGATGSPGASPGTSSTGSPASSSDLGELPVDARFPPRVPKSFPFNTSVVYKKTLFVEFTDHLFNIAKPRPPWMGLLGPTIQAEVYDTVVITLKNMASHPVSLHAVGVSYWKASEGAEYDDQTSQREKEDDKVFPGGSHTYVWQVLKENGPMASDPLCLTYSYLSHVDLVKDLNSGLIGALLVCREGSLAKEKTQTLHKFILLFAVFDEGKSWHSETKNSLMQDRDAASARAWPKMHTVNGYVNRSLPGLIGCHRKSVYWHVIGMGTTPEVHSIFLEGHTFLVRNHRQASLEISPITFLTAQTLLMDLGQFLLFCHISSHQHDGMEAYVKVDSCPEEPQLRMKNNEEAEDYDDDLTDSEMDVVRFDDDNSPSFIQIRSVAKKHPKTWVHYIAAEEEDWDYAPLVLAPDDRSYKSQYLNNGPQRIGRKYKKVRFMAYTDETFKTREAIQHESGILGPLLYGEVGDTLLIIFKNQASRPYNIYPHGITDVRPLYSRRLPKGVKHLKDFPILPGEIFKYKWTVTVEDGPTKSDPRCLTRYYSSFVNMERDLASGLIGPLLICYKESVDQRGNQIMSDKRNVILFSVFDENRSWYLTENIQRFLPNPAGVQLEDPEFQASNIMHSINGYVFDSLQLSVCLHEVAYWYILSIGAQTDFLSVFFSGYTFKHKMVYEDTLTLFPFSGETVFMSMENPGLWILGCHNSDFRNRGMTALLKVSSCDKNTGDYYEDSYEDISAYLLSKNNAIEPRSFSQNGAPSPAGSPTSTEEGTSESATPESGPGSEPATSGSETPGTSESATPESGPGTSTEPSEGSAPGTSTEPSEGSAPGTSTEPSEGSAPGTSTEPSEGSAPGTSTEPSEGSAPGTSTEPSEGSAPGSPAGSPTSTEEGTSTEPSEGSAPGASSPPVLKRHQAEITRTTLQSDQEEIDYDDTISVEMKKEDFDIYDEDENQSPRSFQKKTRHYFIAAVERLWDYGMSSSPHVLRNRAQGAPTSESATPESGPGSEPATSGSETPGTSESATPESGPGSEPATSGSETPGTSESATPESGPGTSTEPSEGSAPGTSESATPESGPGSPAGSPTSTEEGSPAGSPTSTEEGSPAGSPTSTEEGTSESATPESGPGTSTEPSEGSAPGASSRAQSGSVPQFKKVVFQEFTDGSFTQPLYRGELNEHLGLLGPYIRAEVEDNIMVTFRNQASRPYSFYSSLISYEEDQRQGAEPRKNFVKPNETKTYFWKVQHHMAPTKDEFDCKAWAYFSDVDLEKDVHSGLIGPLLVCHTNTLNPAHGRQVTVQEFALFFTIFDETKSWYFTENMERNCRAPCNIQMEDPTFKENYRFHAINGYIMDTLPGLVMAQDQRIRWYLLSMGSNENIHSIHFSGHVFTVRKKEEYKMALYNLYPGVFETVEMLPSKAGIWRVECLIGEHLHAGMSTLFLVYSNKCQTPLGMASGHIRDFQITASGQYGQWAPKLARLHYSGSINAWSTKEPFSWIKVDLLAPMIIHGIKTQGARQKFSSLYISQFIIMYSLDGKKWQTYRGNSTGTLMVFFGNVDSSGIKHNIFNPPIIARYIRLHPTHYSIRSTLRMELMGCDLNSCSMPLGMESKAISDAQITASSYFTNMFATWSPSKARLHLQGRSNAWRPQVNNPKEWLQVDFQKTMKVTGVTTQGVKSLLTSMYVKEFLISSSQDGHQWTLFFQNGKVKVFQGNQDSFTPVVNSLDPPLLTRYLRIHPQSWVHQIALRMEVLGCEAQDLYGAPGTSESATPESGPGSEPATSGSETPGTSESATPESGPGSEPATSGSETPGTSESATPESGPGTSTEPSEGSAPGSPAGSPTSTEEGTSESATPESGPGSEPATSGSETPGTSESATPESGPGSPAGSPTSTEEGSPAGSPTSTEEGTSTEPSEGSAPGTSESATPESGPGTSESATPESGPGTSESATPESGPGSEPATSGSETPGSEPATSGSETPGSPAGSPTSTEEGTSTEPSEGSAPGTSTEPSEGSAPGSEPATSGSETPGTSESATPESGPGTSTEPSEGSAPASSEQKLISEEDLSPATGHHHHHH

SEQ ID NO: 1238 - DNA, 6621 bp, synthetic construct
  misc_feature 1..6621: note = Description of Artificial Sequence: Synthetic polynucleotide
  source 1..6621: mol_type = other DNA
gccaccagaagatactacctgggtgcagtggaactgtcatgggactatatgcaaggcgcgccaggctccagcccctccgcgagcacgggaaccggaccaggttcgtcaccctcagcatcaacggggacgggaccgggggcgtcaccaggaacgtcctccaccggctcgccgggtgcatcacccggaacgtcatcgaccggatcgccagggagctcgacgccatcaggcgcaacaggatcacctggctcaagccctagcgcgtcaaccggcacgggtccgggtgcctcccctggcacgtccagcaccggatcacccggatcgagcccatccgcctcaaccggaaccggacccggtacaccagggtcgggaacagcctcctcgtcaccaggctcctcaaccccctcgggagccacgggttcgcccggttcgtcaacgccttccggagcaactggtagccccggagcatcgccaggaacttcgagcacggggtcgcccgcctcgagcagtgatctcggtgagctgcctgtggacgcaagatttcctcctagagtgccaaaatcttttccattcaacacctcagtcgtgtacaaaaagactctgtttgtagaattcacggatcaccttttcaacatcgctaagccaaggccaccctggatgggtctgctaggtcctaccatccaggctgaggtttatgatacagtggtcattacacttaagaacatggcttcccatcctgtcagtcttcatgctgttggtgtatcctactggaaagcttctgagggagctgaatatgatgatcagaccagtcaaagggagaaagaagatgataaagtcttccctggtggaagccatacatatgtctggcaggtcctgaaagagaatggtccaatggcctctgacccactgtgccttacctactcatatctttctcatgtggacctggtaaaagacttgaattcaggcctcattggagccctactagtatgtagagaagggagtctggccaaggaaaagacacagaccttgcacaaatttatactactttttgctgtatttgatgaagggaaaagttggcactcagaaacaaagaactccttgatgcaggatagggatgctgcatctgctcgggcctggcctaaaatgcacacagtcaatggttatgtaaacaggtctctgccaggtctgattggatgccacaggaaatcagtctattggcatgtgattggaatgggcaccactcctgaagtgcactcaatattcctcgaaggtcacacatttcttgtgaggaaccatcgccaggctagcttggaaatctcgccaataactttccttactgctcaaacactcttgatggaccttggacagtttctactgttttgtcatatctcttcccaccaacatgatggcatggaagcttatgtcaaagtagacagctgtccagaggaaccccaactacgaatgaaaaataatgaagaagcggaagactatgatgatgatcttactgattctgaaatggatgtggtcaggtttgatgatgacaactctccttcctttatccaaattcgctcagttgccaagaagcatcctaaaacttgggtacattacattgctgctgaagaggaggactgggactatgctcccttagtcctcgcccccgatgacagaagttataaaagtcaatatttgaacaatggccctcagcggattggtaggaagtacaaaaaagtccgatttatggcatacacagatgaaacctttaagactcgtgaagctattcagcatgaatcaggaatcttgggacctttactttatggggaagttggagacacactgttgattatatttaagaatcaagcaagcagaccatataacatctaccctcacggaatcactgatgtccgtcctttgtattcaaggagattaccaaaaggtgtaaaacatttgaaggattttccaattctgccaggagaaatattcaaatataaatggacagtgactgtagaagatgggccaactaaatcagatcctcggtgcctgacccgctattactctagtttcgttaatatggagagagatctagcttcaggactcattggccctctcctcatctgctacaaagaatctgtagatcaaagaggaaaccagataatgtcagacaagaggaatgtcatcctgttttctgtatttgatgagaaccgaagctggtacctcacagagaatatacaacgctttctccccaatccagctggagtgcagcttgaggatccagagttccaagcctccaacatcatgcacagcatcaatggctatgtttttgatagtttgcagttgtcagtttgtttgcatgaggtggcatactggtacattctaagcattggagcacagactgacttcctttctgtcttcttctctggatataccttcaaacacaaaatggtctatgaagacacactcaccctattcccattctcaggagaaactgtcttcatgtcgatggaaaacccaggtctatggattctggggtgccacaactcagactttcggaacagaggcatgaccgccttactgaaggtttctagttgtgacaagaacactggtgattattacgaggacagttatgaagatatttcagcatacttgctgagtaaaaacaatgccattgaaccaagaagcttctctcaaaacggcgcgccaagtcccgctggaagcccaactagcaccgaagaggggacctcagagtccgccacccccgagtccggccctggctctgagcctgccactagcggctccgagactcctggcacatccgaaagcgctacacccgagagtggacccggcacctctaccgagcccagtgagggctccgcccctggaacaagcaccgagcccagcgaaggcagcgccccagggacctccacagagcccagtgaaggcagtgctcctggcaccagcaccgaaccaagcgagggctctgcacccgggacctccaccgagccaagcgaaggctctgcccctggcacttccaccgagcccagcgaaggcagcgcccctgggagccccgctggctctcccaccagcactgaggagggcacatctaccgaaccaagtgaaggctctgcaccaggtgcctcgagcccaccagtcttgaaacgccatcaagctgaaataactcgtactactcttcagtcagatcaagaggaaatcgattatgatgataccatatcagttgaaatgaagaaggaagattttgacatttatgatgaggatgaaaatcagagcccccgcagctttcaaaagaaaacacgacactattttattgctgcagtggagaggctctgggattatgggatgagtagctccccacatgttctaagaaacagggctcagggcgcgccaacgtccgaaagtgctacccctgagtcaggccctggtagtgagcctgccacaagcggaagcgaaactccggggacctcagagtctgccactcccgaatcggggccaggctctgaaccggccacttcagggagcgaaacaccaggaacatcggagagcgctaccccggagagcgggccaggaactagtactgagcctagcgagggaagtgcacctggtacaagcgagtccgccacacccgagtctggccctggctctccagcgggctcacccacgagcactgaagagggctctcccgctggcagcccaacgtcgacagaagaaggatcaccagcaggctcccccacatcaacagaggagggtacatcagaatctgctactcccgagagtggacccggtacctccactgagcccagcgaggggagtgcaccaggtgcctcgagcagggctcagagtggcagtgtccctcagttcaagaaagttgttttccaggaatttactgatggctcctttactcagcccttataccgtggagaactaaatgaacatttgggactcctggggccatatataagagcagaagttgaagataatatcatggtaactttcagaaatcaggcctctcgtccctattccttctattctagccttatttcttatgaggaagatcagaggcaaggagcagaacctagaaaaaactttgtcaagcctaatgaaaccaaaacttacttttggaaagtgcaacatcatatggcacccactaaagatgagtttgactgcaaagcctgggcttatttctctgatgttgacctggaaaaagatgtgcactcaggcctgattggaccccttctggtctgccacactaacacactgaaccctgctcatgggagacaagtgacagtacaggaatttgctctgtttttcaccatctttgatgagaccaaaagctggtacttcactgaaaatatggaaagaaactgcagggctccctgcaatatccagatggaagatcccacttttaaagagaattatcgcttccatgcaatcaatggctacataatggatacactacctggcttagtaatggctcaggatcaaaggattcgatggtatctgctcagcatgggcagcaatgaaaacatccattctattcatttcagtggacatgtgttcactgtacgaaaaaaagaggagtataaaatggcactgtacaatctctatccaggtgtttttgagacagtggaaatgttaccatccaaagctggaatttggcgggtggaatgccttattggcgagcatctacatgctgggatgagcacactttttctggtgtacagcaataagtgtcagactcccctgggaatggcttctggacacattagagattttcagattacagcttcaggacaatatggacagtgggccccaaagctggccagacttcattattccggatcaatcaatgcctggagcaccaaggagcccttttcttggatcaaggtggatctgttggcaccaatgattattcacggcatcaagacccagggtgcccgtcagaagttctccagcctctacatctctcagtttatcatcatgtatagtcttgatgggaagaagtggcagacttatcgaggaaattccactggaaccttaatggtcttctttggcaatgtggattcatctgggataaaacacaatatttttaaccctccaattattgctcgatacatccgtttgcacccaactcattatagcattcgcagcactcttcgcatggagttgatgggctgtgatttaaatagttgcagcatgccattgggaatggagagtaaagcaatatcagatgcacagattactgcttcatcctactttaccaatatgtttgccacctggtctccttcaaaagctcgacttcacctccaagggaggagtaatgcctggagacctcaggtgaataatccaaaagagtggctgcaagtggacttccagaagacaatgaaagtcacaggagtaactactcagggagtaaaatctctgcttaccagcatgtatgtgaaggagttcctcatctccagcagtcaagatggccatcagtggactctcttttttcagaatggcaaagtaaaggtttttcagggaaatcaagactccttcacacctgtggtgaactctctagacccaccgttactgactcgctaccttcgaattcacccccagagttgggtgcaccagattgccctgaggatggaggttctgggctgcgaggcacaggacctctacggcgcgccaggtacctcagagtctgctacccccgagtcagggccaggatcagagccagccacctccgggtctgagacacccgggacttccgagagtgccacccctgagtccggacccgggtccgagcccgccacttccggctccgaaactcccggcacaagcgagagcgctaccccagagtcaggaccaggaacatctacagagccctctgaaggctccgctccagggtccccagccggcagtcccactagcaccgaggagggaacctctgaaagcgccacacccgaatcagggccagggtctgagcctgctaccagcggcagcgagacaccaggcacctctgagtccgccacaccagagtccggacccggatctcccgctgggagccccacctccactgaggagggatctcctgctggctctccaacatctactgaggaaggtacctcaaccgagccatccgagggatcagctcccggcacctcagagtcggcaaccccggagtctggacccggaacttccgaaagtgccacaccagagtccggtcccgggacttcagaatcagcaacacccgagtccggccctgggtctgaacccgccacaagtggtagtgagacaccaggatcagaacctgctacctcagggtcagagacacccggatctccggcaggctcaccaacctccactgaggagggcaccagcacagaaccaagcgagggctccgcacccggaacaagcactgaacccagtgagggttcagcacccggctctgagccggccacaagtggcagtgagacacccggcacttcagagagtgccacccccgagagtggcccaggcactagtaccgagccctctgaaggcagtgcgccagcctcgagcgaacaaaaactcatctcagaagaggatctgtcacctgcaaccggtcatcatcaccatcaccattga

SEQ ID NO: 1239 - protein, 2206 aa, synthetic construct
  REGION 1..2206: note = Description of Artificial Sequence: Synthetic polypeptide
ATRRYYLGAVELSWDYMQGAPGSSPSASTGTGPGSSPSASTGTGPGASPGTSSTGSPGASPGTSSTGSPGSSTPSGATGSPGSSPSASTGTGPGASPGTSSTGSPGSSPSASTGTGPGTPGSGTASSSPGSSTPSGATGSPGSSTPSGATGSPGASPGTSSTGSPASSSDLGELPVDARFPPRVPKSFPFNTSVVYKKTLFVEFTDHLFNIAKPRPPWMGLLGPTIQAEVYDTVVITLKNMASHPVSLHAVGVSYWKASEGAEYDDQTSQREKEDDKVFPGGSHTYVWQVLKENGPMASDPLCLTYSYLSHVDLVKDLNSGLIGALLVCREGSLAKEKTQTLHKFILLFAVFDEGKSWHSETKNSLMQDRDAASARAWPKMHTVNGYVNRSLPGLIGCHRKSVYWHVIGMGTTPEVHSIFLEGHTFLVRNHRQASLEISPITFLTAQTLLMDLGQFLLFCHISSHQHDGMEAYVKVDSCPEEPQLRMKNNEEAEDYDDDLTDSEMDVVRFDDDNSPSFIQIRSVAKKHPKTWVHYIAAEEEDWDYAPLVLAPDDRSYKSQYLNNGPQRIGRKYKKVRFMAYTDETFKTREAIQHESGILGPLLYGEVGDTLLIIFKNQASRPYNIYPHGITDVRPLYSRRLPKGVKHLKDFPILPGEIFKYKWTVTVEDGPTKSDPRCLTRYYSSFVNMERDLASGLIGPLLICYKESVDQRGNQIMSDKRNVILFSVFDENRSWYLTENIQRFLPNPAGVQLEDPEFQASNIMHSINGYVFDSLQLSVCLHEVAYWYILSIGAQTDFLSVFFSGYTFKHKMVYEDTLTLFPFSGETVFMSMENPGLWILGCHNSDFRNRGMTALLKVSSCDKNTGDYYEDSYEDISAYLLSKNNAIEPRSFSQNGAPSPAGSPTSTEEGTSESATPESGPGSEPATSGSETPGTSESATPESGPGTSTEPSEGSAPGTSTEPSEGSAPGTSTEPSEGSAPGTSTEPSEGSAPGTSTEPSEGSAPGTSTEPSEGSAPGSPAGSPTSTEEGTSTEPSEGSAPGASSPPVLKRHQAEITRTTLQSDQEEIDYDDTISVEMKKEDFDIYDEDENQSPRSFQKKTRHYFIAAVERLWDYGMSSSPHVLRNRAQGAPGTPGSGTASSSPGASPGTSSTGSPGASPGTSSTGSPGASPGTSSTGSPGSSPSASTGTGPGTPGSGTASSSPGASPGTSSTGSPGASPGTSSTGSPGASPGTSSTGSPGSSTPSGATGSPGSSTPSGATGSPGASPGTSSTGSPASSRAQSGSVPQFKKVVFQEFTDGSFTQPLYRGELNEHLGLLGPYIRAEVEDNIMVTFRNQASRPYSFYSSLISYEEDQRQGAEPRKNFVKPNETKTYFWKVQHHMAPTKDEFDCKAWAYFSDVDLEKDVHSGLIGPLLVCHTNTLNPAHGRQVTVQEFALFFTIFDETKSWYFTENMERNCRAPCNIQMEDPTFKENYRFHAINGYIMDTLPGLVMAQDQRIRWYLLSMGSNENIHSIHFSGHVFTVRKKEEYKMALYNLYPGVFETVEMLPSKAGIWRVECLIGEHLHAGMSTLFLVYSNKCQTPLGMASGHIRDFQITASGQYGQWAPKLARLHYSGSINAWSTKEPFSWIKVDLLAPMIIHGIKTQGARQKFSSLYISQFIIMYSLDGKKWQTYRGNSTGTLMVFFGNVDSSGIKHNIFNPPIIARYIRLHPTHYSIRSTLRMELMGCDLNSCSMPLGMESKAISDAQITASSYFTNMFATWSPSKARLHLQGRSNAWRPQVNNPKEWLQVDFQKTMKVTGVTTQGVKSLLTSMYVKEFLISSSQDGHQWTLFFQNGKVKVFQGNQDSFTPVVNSLDPPLLTRYLRIHPQSWVHQIALRMEVLGCEAQDLYGAPGTSESATPESGPGSEPATSGSETPGTSESATPESGPGSEPATSGSETPGTSESATPESGPGTSTEPSEGSAPGSPAGSPTSTEEGTSESATPESGPGSEPATSGSETPGTSESATPESGPGSPAGSPTSTEEGSPAGSPTSTEEGTSTEPSEGSAPGTSESATPESGPGTSESATPESGPGTSESATPESGPGSEPATSGSETPGSEPATSGSETPGSPAGSPTSTEEGTSTEPSEGSAPGTSTEPSEGSAPGSEPATSGSETPGTSESATPESGPGTSTEPSEGSAPASSEQKLISEEDLSPATGHHHHHH

SEQ ID NO: 1240 - DNA, 6621 bp, synthetic construct
  misc_feature 1..6621: note = Description of Artificial Sequence: Synthetic polynucleotide
  source 1..6621: mol_type = other DNA
gccaccagaagatactacctgggtgcagtggaactgtcatgggactatatgcaaggcgcgccaggctccagcccctccgcgagcacgggaaccggaccaggttcgtcaccctcagcatcaacggggacgggaccgggggcgtcaccaggaacgtcctccaccggctcgccgggtgcatcacccggaacgtcatcgaccggatcgccagggagctcgacgccatcaggcgcaacaggatcacctggctcaagccctagcgcgtcaaccggcacgggtccgggtgcctcccctggcacgtccagcaccggatcacccggatcgagcccatccgcctcaaccggaaccggacccggtacaccagggtcgggaacagcctcctcgtcaccaggctcctcaaccccctcgggagccacgggttcgcccggttcgtcaacgccttccggagcaactggtagccccggagcatcgccaggaacttcgagcacggggtcgcccgcctcgagcagtgatctcggtgagctgcctgtggacgcaagatttcctcctagagtgccaaaatcttttccattcaacacctcagtcgtgtacaaaaagactctgtttgtagaattcacggatcaccttttcaacatcgctaagccaaggccaccctggatgggtctgctaggtcctaccatccaggctgaggtttatgatacagtggtcattacacttaagaacatggcttcccatcctgtcagtcttcatgctgttggtgtatcctactggaaagcttctgagggagctgaatatgatgatcagaccagtcaaagggagaaagaagatgataaagtcttccctggtggaagccatacatatgtctggcaggtcctgaaagagaatggtccaatggcctctgacccactgtgccttacctactcatatctttctcatgtggacctggtaaaagacttgaattcaggcctcattggagccctactagtatgtagagaagggagtctggccaaggaaaagacacagaccttgcacaaatttatactactttttgctgtatttgatgaagggaaaagttggcactcagaaacaaagaactccttgatgcaggatagggatgctgcatctgctcgggcctggcctaaaatgcacacagtcaatggttatgtaaacaggtctctgccaggtctgattggatgccacaggaaatcagtctattggcatgtgattggaatgggcaccactcctgaagtgcactcaatattcctcgaaggtcacacatttcttgtgaggaaccatcgccaggctagcttggaaatctcgccaataactttccttactgctcaaacactcttgatggaccttggacagtttctactgttttgtcatatctcttcccaccaacatgatggcatggaagcttatgtcaaagtagacagctgtccagaggaaccccaactacgaatgaaaaataatgaagaagcggaagactatgatgatgatcttactgattctgaaatggatgtggtcaggtttgatgatgacaactctccttcctttatccaaattcgctcagttgccaagaagcatcctaaaacttgggtacattacattgctgctgaagaggaggactgggactatgctcccttagtcctcgcccccgatgacagaagttataaaagtcaatatttgaacaatggccctcagcggattggtaggaagtacaaaaaagtccgatttatggcatacacagatgaaacctttaagactcgtgaagctattcagcatgaatcaggaatcttgggacctttactttatggggaagttggagacacactgttgattatatttaagaatcaagcaagcagaccatataacatctaccctcacggaatcactgatgtccgtcctttgtattcaaggagattaccaaaaggtgtaaaacatttgaaggattttccaattctgccaggagaaatattcaaatataaatggacagtgactgtagaagatgggccaactaaatcagatcctcggtgcctgacccgctattactctagtttcgttaatatggagagagatctagcttcaggactcattggccctctcctcatctgctacaaagaatctgtagatcaaagaggaaaccagataatgtcagacaagaggaatgtcatcctgttttctgtatttgatgagaaccgaagctggtacctcacagagaatatacaacgctttctccccaatccagctggagtgcagcttgaggatccagagttccaagcctccaacatcatgcacagcatcaatggctatgtttttgatagtttgcagttgtcagtttgtttgcatgaggtggcatactggtacattctaagcattggagcacagactgacttcctttctgtcttcttctctggatataccttcaaacacaaaatggtctatgaagacacactcaccctattcccattctcaggagaaactgtcttcatgtcgatggaaaacccaggtctatggattctggggtgccacaactcagactttcggaacagaggcatgaccgccttactgaaggtttctagttgtgacaagaacactggtgattattacgaggacagttatgaagatatttcagcatacttgctgagtaaaaacaatgccattgaaccaagaagcttctctcaaaacggcgcgccaagtcccgctggaagcccaactagcaccgaagaggggacctcagagtccgccacccccgagtccggccctggctctgagcctgccactagcggctccgagactcctggcacatccgaaagcgctacacccgagagtggacccggcacctctaccgagcccagtgagggctccgcccctggaacaagcaccgagcccagcgaaggcagcgccccagggacctccacagagcccagtgaaggcagtgctcctggcaccagcaccgaaccaagcgagggctctgcacccgggacctccaccgagccaagcgaaggctctgcccctggcacttccaccgagcccagcgaaggcagcgcccctgggagccccgctggctctcccaccagcactgaggagggcacatctaccgaaccaagtgaaggctctgcaccaggtgcctcgagcccaccagtcttgaaacgccatcaagctgaaataactcgtactactcttcagtcagatcaagaggaaatcgattatgatgataccatatcagttgaaatgaagaaggaagattttgacatttatgatgaggatgaaaatcagagcccccgcagctttcaaaagaaaacacgacactattttattgctgcagtggagaggctctgggattatgggatgagtagctccccacatgttctaagaaacagggctcagggcgcgccaggtacacccggatcgggtacagcgtcatcgagccccggtgcgtcacctggtacgtcgagcacggggtcgccaggggcgtcccctgggacgtcctcaacaggctcgcccggtgcgtcacccggcacgtcgtccacgggttcacctggtagctccccttccgcgtccactggcaccgggcctggaactccggggagcggcacagcgagctcgtcgccgggagcatcgcctgggacatcgagcaccgggtcgccaggagcatcgcccggaacatccagcacaggaagccccggcgcgtcgcccgggacatcaagcacaggttccccgggatcgagcacgccgtccggagccactggatcaccagggagctcgacaccttccggcgcaacgggatcgcccggagccagcccgggtacgtcaagcactggctcccctgcctcgagcagggctcagagtggcagtgtccctcagttcaagaaagttgttttccaggaatttactgatggctcctttactcagcccttataccgtggagaactaaatgaacatttgggactcctggggccatatataagagcagaagttgaagataatatcatggtaactttcagaaatcaggcctctcgtccctattccttctattctagccttatttcttatgaggaagatcagaggcaaggagcagaacctagaaaaaactttgtcaagcctaatgaaaccaaaacttacttttggaaagtgcaacatcatatggcacccactaaagatgagtttgactgcaaagcctgggcttatttctctgatgttgacctggaaaaagatgtgcactcaggcctgattggaccccttctggtctgccacactaacacactgaaccctgctcatgggagacaagtgacagtacaggaatttgctctgtttttcaccatctttgatgagaccaaaagctggtacttcactgaaaatatggaaagaaactgcagggctccctgcaatatccagatggaagatcccacttttaaagagaattatcgcttccatgcaatcaatggctacataatggatacactacctggcttagtaatggctcaggatcaaaggattcgatggtatctgctcagcatgggcagcaatgaaaacatccattctattcatttcagtggacatgtgttcactgtacgaaaaaaagaggagtataaaatggcactgtacaatctctatccaggtgtttttgagacagtggaaatgttaccatccaaagctggaatttggcgggtggaatgccttattggcgagcatctacatgctgggatgagcacactttttctggtgtacagcaataagtgtcagactcccctgggaatggcttctggacacattagagattttcagattacagcttcaggacaatatggacagtgggccccaaagctggccagacttcattattccggatcaatcaatgcctggagcaccaaggagcccttttcttggatcaaggtggatctgttggcaccaatgattattcacggcatcaagacccagggtgcccgtcagaagttctccagcctctacatctctcagtttatcatcatgtatagtcttgatgggaagaagtggcagacttatcgaggaaattccactggaaccttaatggtcttctttggcaatgtggattcatctgggataaaacacaatatttttaaccctccaattattgctcgatacatccgtttgcacccaactcattatagcattcgcagcactcttcgcatggagttgatgggctgtgatttaaatagttgcagcatgccattgggaatggagagtaaagcaatatcagatgcacagattactgcttcatcctactttaccaatatgtttgccacctggtctccttcaaaagctcgacttcacctccaagggaggagtaatgcctggagacctcaggtgaataatccaaaagagtggctgcaagtggacttccagaagacaatgaaagtcacaggagtaactactcagggagtaaaatctctgcttaccagcatgtatgtgaaggagttcctcatctccagcagtcaagatggccatcagtggactctcttttttcagaatggcaaagtaaaggtttttcagggaaatcaagactccttcacacctgtggtgaactctctagacccaccgttactgactcgctaccttcgaattcacccccagagttgggtgcaccagattgccctgaggatggaggttctgggctgcgaggcacaggacctctacggcgcgccaggtacctcagagtctgctacccccgagtcagggccaggatcagagccagccacctccgggtctgagacacccgggacttccgagagtgccacccctgagtccggacccgggtccgagcccgccacttccggctccgaaactcccggcacaagcgagagcgctaccccagagtcaggaccaggaacatctacagagccctctgaaggctccgctccagggtccccagccggcagtcccactagcaccgaggagggaacctctgaaagcgccacacccgaatcagggccagggtctgagcctgctaccagcggcagcgagacaccaggcacctctgagtccgccacaccagagtccggacccggatctcccgctgggagccccacctccactgaggagggatctcctgctggctctccaacatctactgaggaaggtacctcaaccgagccatccgagggatcagctcccggcacctcagagtcggcaaccccggagtctggacccggaacttccgaaagtgccacaccagagtccggtcccgggacttcagaatcagcaacacccgagtccggccctgggtctgaacccgccacaagtggtagtgagacaccaggatcagaacctgctacctcagggtcagagacacccggatctccggcaggctcaccaacctccactgaggagggcaccagcacagaaccaagcgagggctccgcacccggaacaagcactgaacccagtgagggttcagcacccggctctgagccggccacaagtggcagtgagacacccggcacttcagagagtgccacccccgagagtggcccaggcactagtaccgagccctctgaaggcagtgcgccagcctcgagcgaacaaaaactcatctcagaagaggatctgtcacctgcaaccggtcatcatcaccatcaccattga

SEQ ID NO: 1241 - protein, 2206 aa, synthetic construct
  REGION 1..2206: note = Description of Artificial Sequence: Synthetic polypeptide
ATRRYYLGAVELSWDYMQSDLGELPVGAPGSSPSASTGTGPGSSPSASTGTGPGASPGTSSTGSPGASPGTSSTGSPGSSTPSGATGSPGSSPSASTGTGPGASPGTSSTGSPGSSPSASTGTGPGTPGSGTASSSPGSSTPSGATGSPGSSTPSGATGSPGASPGTSSTGSPASSDARFPPRVPKSFPFNTSVVYKKTLFVEFTDHLFNIAKPRPPWMGLLGPTIQAEVYDTVVITLKNMASHPVSLHAVGVSYWKASEGAEYDDQTSQREKEDDKVFPGGSHTYVWQVLKENGPMASDPLCLTYSYLSHVDLVKDLNSGLIGALLVCREGSLAKEKTQTLHKFILLFAVFDEGKSWHSETKNSLMQDRDAASARAWPKMHTVNGYVNRSLPGLIGCHRKSVYWHVIGMGTTPEVHSIFLEGHTFLVRNHRQASLEISPITFLTAQTLLMDLGQFLLFCHISSHQHDGMEAYVKVDSCPEEPQLRMKNNEEAEDYDDDLTDSEMDVVRFDDDNSPSFIQIRSVAKKHPKTWVHYIAAEEEDWDYAPLVLAPDDRSYKSQYLNNGPQRIGRKYKKVRFMAYTDETFKTREAIQHESGILGPLLYGEVGDTLLIIFKNQASRPYNIYPHGITDVRPLYSRRLPKGVKHLKDFPILPGEIFKYKWTVTVEDGPTKSDPRCLTRYYSSFVNMERDLASGLIGPLLICYKESVDQRGNQIMSDKRNVILFSVFDENRSWYLTENIQRFLPNPAGVQLEDPEFQASNIMHSINGYVFDSLQLSVCLHEVAYWYILSIGAQTDFLSVFFSGYTFKHKMVYEDTLTLFPFSGETVFMSMENPGLWILGCHNSDFRNRGMTALLKVSSCDKNTGDYYEDSYEDISAYLLSKNNAIEPRSFSQNGAPSPAGSPTSTEEGTSESATPESGPGSEPATSGSETPGTSESATPESGPGTSTEPSEGSAPGTSTEPSEGSAPGTSTEPSEGSAPGTSTEPSEGSAPGTSTEPSEGSAPGTSTEPSEGSAPGSPAGSPTSTEEGTSTEPSEGSAPGASSPPVLKRHQAEITRTTLQSDQEEIDYDDTISVEMKKEDFDIYDEDENQSPRSFQKKTRHYFIAAVERLWDYGMSSSPHVLRNRAQGAPGTPGSGTASSSPGASPGTSSTGSPGASPGTSSTGSPGASPGTSSTGSPGSSPSASTGTGPGTPGSGTASSSPGASPGTSSTGSPGASPGTSSTGSPGASPGTSSTGSPGSSTPSGATGSPGSSTPSGATGSPGASPGTSSTGSPASSRAQSGSVPQFKKVVFQEFTDGSFTQPLYRGELNEHLGLLGPYIRAEVEDNIMVTFRNQASRPYSFYSSLISYEEDQRQGAEPRKNFVKPNETKTYFWKVQHHMAPTKDEFDCKAWAYFSDVDLEKDVHSGLIGPLLVCHTNTLNPAHGRQVTVQEFALFFTIFDETKSWYFTENMERNCRAPCNIQMEDPTFKENYRFHAINGYIMDTLPGLVMAQDQRIRWYLLSMGSNENIHSIHFSGHVFTVRKKEEYKMALYNLYPGVFETVEMLPSKAGIWRVECLIGEHLHAGMSTLFLVYSNKCQTPLGMASGHIRDFQITASGQYGQWAPKLARLHYSGSINAWSTKEPFSWIKVDLLAPMIIHGIKTQGARQKFSSLYISQFIIMYSLDGKKWQTYRGNSTGTLMVFFGNVDSSGIKHNIFNPPIIARYIRLHPTHYSIRSTLRMELMGCDLNSCSMPLGMESKAISDAQITASSYFTNMFATWSPSKARLHLQGRSNAWRPQVNNPKEWLQVDFQKTMKVTGVTTQGVKSLLTSMYVKEFLISSSQDGHQWTLFFQNGKVKVFQGNQDSFTPVVNSLDPPLLTRYLRIHPQSWVHQIALRMEVLGCEAQDLYGAPGTSESATPESGPGSEPATSGSETPGTSESATPESGPGSEPATSGSETPGTSESATPESGPGTSTEPSEGSAPGSPAGSPTSTEEGTSESATPESGPGSEPATSGSETPGTSESATPESGPGSPAGSPTSTEEGSPAGSPTSTEEGTSTEPSEGSAPGTSESATPESGPGTSESATPESGPGTSESATPESGPGSEPATSGSETPGSEPATSGSETPGSPAGSPTSTEEGTSTEPSEGSAPGTSTEPSEGSAPGSEPATSGSETPGTSESATPESGPGTSTEPSEGSAPASSEQKLISEEDLSPATGHHHHHH

SEQ ID NO: 1242 - DNA, 6621 bp, synthetic construct
  misc_feature 1..6621: note = Description of Artificial Sequence: Synthetic polynucleotide
  source 1..6621: mol_type = other DNA
gccaccagaagatactacctgggtgcagtggaactgtcatgggactatatgcaaagtgatctcggtgagctgcctgtgggcgcgccaggctccagcccctccgcgagcacgggaaccggaccaggttcgtcaccctcagcatcaacggggacgggaccgggggcgtcaccaggaacgtcctccaccggctcgccgggtgcatcacccggaacgtcatcgaccggatcgccagggagctcgacgccatcaggcgcaacaggatcacctggctcaagccctagcgcgtcaaccggcacgggtccgggtgcctcccctggcacgtccagcaccggatcacccggatcgagcccatccgcctcaaccggaaccggacccggtacaccagggtcgggaacagcctcctcgtcaccaggctcctcaaccccctcgggagccacgggttcgcccggttcgtcaacgccttccggagcaactggtagccccggagcatcgccaggaacttcgagcacggggtcgcccgcctcgagcgacgcaagatttcctcctagagtgccaaaatcttttccattcaacacctcagtcgtgtacaaaaagactctgtttgtagaattcacggatcaccttttcaacatcgctaagccaaggccaccctggatgggtctgctaggtcctaccatccaggctgaggtttatgatacagtggtcattacacttaagaacatggcttcccatcctgtcagtcttcatgctgttggtgtatcctactggaaagcttctgagggagctgaatatgatgatcagaccagtcaaagggagaaagaagatgataaagtcttccctggtggaagccatacatatgtctggcaggtcctgaaagagaatggtccaatggcctctgacccactgtgccttacctactcatatctttctcatgtggacctggtaaaagacttgaattcaggcctcattggagccctactagtatgtagagaagggagtctggccaaggaaaagacacagaccttgcacaaatttatactactttttgctgtatttgatgaagggaaaagttggcactcagaaacaaagaactccttgatgcaggatagggatgctgcatctgctcgggcctggcctaaaatgcacacagtcaatggttatgtaaacaggtctctgccaggtctgattggatgccacaggaaatcagtctattggcatgtgattggaatgggcaccactcctgaagtgcactcaatattcctcgaaggtcacacatttcttgtgaggaaccatcgccaggctagcttggaaatctcgccaataactttccttactgctcaaacactcttgatggaccttggacagtttctactgttttgtcatatctcttcccaccaacatgatggcatggaagcttatgtcaaagtagacagctgtccagaggaaccccaactacgaatgaaaaataatgaagaagcggaagactatgatgatgatcttactgattctgaaatggatgtggtcaggtttgatgatgacaactctccttcctttatccaaattcgctcagttgccaagaagcatcctaaaacttgggtacattacattgctgctgaagaggaggactgggactatgctcccttagtcctcgcccccgatgacagaagttataaaagtcaatatttgaacaatggccctcagcggattggtaggaagtacaaaaaagtccgatttatggcatacacagatgaaacctttaagactcgtgaagctattcagcatgaatcaggaatcttgggacctttactttatggggaagttggagacacactgttgattatatttaagaatcaagcaagcagaccatataacatctaccctcacggaatcactgatgtccgtcctttgtattcaaggagattaccaaaaggtgtaaaacatttgaaggattttccaattctgccaggagaaatattcaaatataaatggacagtgactgtagaagatgggccaactaaatcagatcctcggtgcctgacccgctattactctagtttcgttaatatggagagagatctagcttcaggactcattggccctctcctcatctgctacaaagaatctgtagatcaaagaggaaaccagataatgtcagacaagaggaatgtcatcctgttttctgtatttgatgagaaccgaagctggtacctcacagagaatatacaacgctttctccccaatccagctggagtgcagcttgaggatccagagttccaagcctccaacatcatgcacagcatcaatggctatgtttttgatagtttgcagttgtcagtttgtttgcatgaggtggcatactggtacattctaagcattggagcacagactgacttcctttctgtcttcttctctggatataccttcaaacacaaaatggtctatgaagacacactcaccctattcccattctcaggagaaactgtcttcatgtcgatggaaaacccaggtctatggattctggggtgccacaactcagactttcggaacagaggcatgaccgccttactgaaggtttctagttgtgacaagaacactggtgattattacgaggacagttatgaagatatttcagcatacttgctgagtaaaaacaatgccattgaaccaagaagcttctctcaaaacggcgcgccaagtcccgctggaagcccaactagcaccgaagaggggacctcagagtccgccacccccgagtccggccctggctctgagcctgccactagcggctccgagactcctggcacatccgaaagcgctacacccgagagtggacccggcacctctaccgagcccagtgagggctccgcccctggaacaagcaccgagcccagcgaaggcagcgccccagggacctccacagagcccagtgaaggcagtgctcctggcaccagcaccgaaccaagcgagggctctgcacccgggacctccaccgagccaagcgaaggctctgcccctggcacttccaccgagcccagcgaaggcagcgcccctgggagccccgctggctctcccaccagcactgaggagggcacatctaccgaaccaagtgaaggctctgcaccaggtgcctcgagcccaccagtcttgaaacgccatcaagctgaaataactcgtactactcttcagtcagatcaagaggaaatcgattatgatgataccatatcagttgaaatgaagaaggaagattttgacatttatgatgaggatgaaaatcagagcccccgcagctttcaaaagaaaacacgacactattttattgctgcagtggagaggctctgggattatgggatgagtagctccccacatgttctaagaaacagggctcagggcgcgccaggtacacccggatcgggtacagcgtcatcgagccccggtgcgtcacctggtacgtcgagcacggggtcgccaggggcgtcccctgggacgtcctcaacaggctcgcccggtgcgtcacccggcacgtcgtccacgggttcacctggtagctccccttccgcgtccactggcaccgggcctggaactccggggagcggcacagcgagctcgtcgccgggagcatcgcctgggacatcgagcaccgggtcgccaggagcatcgcccggaacatccagcacaggaagccccggcgcgtcgcccgggacatcaagcacaggttccccgggatcgagcacgccgtccggagccactggatcaccagggagctcgacaccttccggcgcaacgggatcgcccggagccagcccgggtacgtcaagcactggctcccctgcctcgagcagggctcagagtggcagtgtccctcagttcaagaaagttgttttccaggaatttactgatggctcctttactcagcccttataccgtggagaactaaatgaacatttgggactcctggggccatatataagagcagaagttgaagataatatcatggtaactttcagaaatcaggcctctcgtccctattccttctattctagccttatttcttatgaggaagatcagaggcaaggagcagaacctagaaaaaactttgtcaagcctaatgaaaccaaaacttacttttggaaagtgcaacatcatatggcacccactaaagatgagtttgactgcaaagcctgggcttatttctctgatgttgacctggaaaaagatgtgcactcaggcctgattggaccccttctggtctgccacactaacacactgaaccctgctcatgggagacaagtgacagtacaggaatttgctctgtttttcaccatctttgatgagaccaaaagctggtacttcactgaaaatatggaaagaaactgcagggctccctgcaatatccagatggaagatcccacttttaaagagaattatcgcttccatgcaatcaatggctacataatggatacactacctggcttagtaatggctcaggatcaaaggattcgatggtatctgctcagcatgggcagcaatgaaaacatccattctattcatttcagtggacatgtgttcactgtacgaaaaaaagaggagtataaaatggcactgtacaatctctatccaggtgtttttgagacagtggaaatgttaccatccaaagctggaatttggcgggtggaatgccttattggcgagcatctacatgctgggatgagcacactttttctggtgtacagcaataagtgtcagactcccctgggaatggcttctggacacattagagattttcagattacagcttcaggacaatatggacagtgggccccaaagctggccagacttcattattccggatcaatcaatgcctggagcaccaaggagcccttttcttggatcaaggtggatctgttggcaccaatgattattcacggcatcaagacccagggtgcccgtcagaagttctccagcctctacatctctcagtttatcatcatgtatagtcttgatgggaagaagtggcagacttatcgaggaaattccactggaaccttaatggtcttctttggcaatgtggattcatctgggataaaacacaatatttttaaccctccaattattgctcgatacatccgtttgcacccaactcattatagcattcgcagcactcttcgcatggagttgatgggctgtgatttaaatagttgcagcatgccattgggaatggagagtaaagcaatatcagatgcacagattactgcttcatcctactttaccaatatgtttgccacctggtctccttcaaaagctcgacttcacctccaagggaggagtaatgcctggagacctcaggtgaataatccaaaagagtggctgcaagtggacttccagaagacaatgaaagtcacaggagtaactactcagggagtaaaatctctgcttaccagcatgtatgtgaaggagttcctcatctccagcagtcaagatggccatcagtggactctcttttttcagaatggcaaagtaaaggtttttcagggaaatcaagactccttcacacctgtggtgaactctctagacccaccgttactgactcgctaccttcgaattcacccccagagttgggtgcaccagattgccctgaggatggaggttctgggctgcgaggcacaggacctctacggcgcgccaggtacctcagagtctgctacccccgagtcagggccaggatcagagccagccacctccgggtctgagacacccgggacttccgagagtgccacccctgagtccggacccgggtccgagcccgccacttccggctccgaaactcccggcacaagcgagagcgctaccccagagtcaggaccaggaacatctacagagccctctgaaggctccgctccagggtccccagccggcagtcccactagcaccgaggagggaacctctgaaagcgccacacccgaatcagggccagggtctgagcctgctaccagcggcagcgagacaccaggcacctctgagtccgccacaccagagtccggacccggatctcccgctgggagccccacctccactgaggagggatctcctgctggctctccaacatctactgaggaaggtacctcaaccgagccatccgagggatcagctcccggcacctcagagtcggcaaccccggagtctggacccggaacttccgaaagtgccacaccagagtccggtcccgggacttcagaatcagcaacacccgagtccggccctgggtctgaacccgccacaagtggtagtgagacaccaggatcagaacctgctacctcagggtcagagacacccggatctccggcaggctcaccaacctccactgaggagggcaccagcacagaaccaagcgagggctccgcacccggaacaagcactgaacccagtgagggttcagcacccggctctgagccggccacaagtggcagtgagacacccggcacttcagagagtgccacccccgagagtggcccaggcactagtaccgagccctctgaaggcagtgcgccagcctcgagcgaacaaaaactcatctcagaagaggatctgtcacctgcaaccggtcatcatcaccatcaccattga

SEQ ID NO: 1243 - protein, 2206 aa, synthetic construct
  REGION 1..2206: note = Description of Artificial Sequence: Synthetic polypeptide
ATRRYYLGAVELSWDYMQGAPTSESATPESGPGSEPATSGSETPGTSESATPESGPGSEPATSGSETPGTSESATPESGPGTSTEPSEGSAPGSPAGSPTSTEEGTSESATPESGPGSEPATSGSETPGTSESATPESGPGSPAGSPTSTEEGSPAGSPTSTEEGASSSDLGELPVDARFPPRVPKSFPFNTSVVYKKTLFVEFTDHLFNIAKPRPPWMGLLGPTIQAEVYDTVVITLKNMASHPVSLHAVGVSYWKASEGAEYDDQTSQREKEDDKVFPGGSHTYVWQVLKENGPMASDPLCLTYSYLSHVDLVKDLNSGLIGALLVCREGSLAKEKTQTLHKFILLFAVFDEGKSWHSETKNSLMQDRDAASARAWPKMHTVNGYVNRSLPGLIGCHRKSVYWHVIGMGTTPEVHSIFLEGHTFLVRNHRQASLEISPITFLTAQTLLMDLGQFLLFCHISSHQHDGMEAYVKVDSCPEEPQLRMKNNEEAEDYDDDLTDSEMDVVRFDDDNSPSFIQIRSVAKKHPKTWVHYIAAEEEDWDYAPLVLAPDDRSYKSQYLNNGPQRIGRKYKKVRFMAYTDETFKTREAIQHESGILGPLLYGEVGDTLLIIFKNQASRPYNIYPHGITDVRPLYSRRLPKGVKHLKDFPILPGEIFKYKWTVTVEDGPTKSDPRCLTRYYSSFVNMERDLASGLIGPLLICYKESVDQRGNQIMSDKRNVILFSVFDENRSWYLTENIQRFLPNPAGVQLEDPEFQASNIMHSINGYVFDSLQLSVCLHEVAYWYILSIGAQTDFLSVFFSGYTFKHKMVYEDTLTLFPFSGETVFMSMENPGLWILGCHNSDFRNRGMTALLKVSSCDKNTGDYYEDSYEDISAYLLSKNNAIEPRSFSQNGAPSPAGSPTSTEEGTSESATPESGPGSEPATSGSETPGTSESATPESGPGTSTEPSEGSAPGTSTEPSEGSAPGTSTEPSEGSAPGTSTEPSEGSAPGTSTEPSEGSAPGTSTEPSEGSAPGSPAGSPTSTEEGTSTEPSEGSAPGASSPPVLKRHQAEITRTTLQSDQEEIDYDDTISVEMKKEDFDIYDEDENQSPRSFQKKTRHYFIAAVERLWDYGMSSSPHVLRNRAQGAPGTPGSGTASSSPGASPGTSSTGSPGASPGTSSTGSPGASPGTSSTGSPGSSPSASTGTGPGTPGSGTASSSPGASPGTSSTGSPGASPGTSSTGSPGASPGTSSTGSPGSSTPSGATGSPGSSTPSGATGSPGASPGTSSTGSPASSRAQSGSVPQFKKVVFQEFTDGSFTQPLYRGELNEHLGLLGPYIRAEVEDNIMVTFRNQASRPYSFYSSLISYEEDQRQGAEPRKNFVKPNETKTYFWKVQHHMAPTKDEFDCKAWAYFSDVDLEKDVHSGLIGPLLVCHTNTLNPAHGRQVTVQEFALFFTIFDETKSWYFTENMERNCRAPCNIQMEDPTFKENYRFHAINGYIMDTLPGLVMAQDQRIRWYLLSMGSNENIHSIHFSGHVFTVRKKEEYKMALYNLYPGVFETVEMLPSKAGIWRVECLIGEHLHAGMSTLFLVYSNKCQTPLGMASGHIRDFQITASGQYGQWAPKLARLHYSGSINAWSTKEPFSWIKVDLLAPMIIHGIKTQGARQKFSSLYISQFIIMYSLDGKKWQTYRGNSTGTLMVFFGNVDSSGIKHNIFNPPIIARYIRLHPTHYSIRSTLRMELMGCDLNSCSMPLGMESKAISDAQITASSYFTNMFATWSPSKARLHLQGRSNAWRPQVNNPKEWLQVDFQKTMKVTGVTTQGVKSLLTSMYVKEFLISSSQDGHQWTLFFQNGKVKVFQGNQDSFTPVVNSLDPPLLTRYLRIHPQSWVHQIALRMEVLGCEAQDLYGAPGTSESATPESGPGSEPATSGSETPGTSESATPESGPGSEPATSGSETPGTSESATPESGPGTSTEPSEGSAPGSPAGSPTSTEEGTSESATPESGPGSEPATSGSETPGTSESATPESGPGSPAGSPTSTEEGSPAGSPTSTEEGTSTEPSEGSAPGTSESATPESGPGTSESATPESGPGTSESATPESGPGSEPATSGSETPGSEPATSGSETPGSPAGSPTSTEEGTSTEPSEGSAPGTSTEPSEGSAPGSEPATSGSETPGTSESATPESGPGTSTEPSEGSAPASSEQKLISEEDLSPATGHHHHHH

SEQ ID NO: 1244 - DNA, 6621 bp, synthetic construct
  misc_feature 1..6621: note = Description of Artificial Sequence: Synthetic polynucleotide
  source 1..6621: mol_type = other DNA
gccaccagaagatactacctgggtgcagtggaactgtcatgggactatatgcaaggcgcgccaacatcagagagcgccacccctgaaagtggtcccgggagcgagccagccacatctgggtcggaaacgccaggcacaagtgagtctgcaactcccgagtccggacctggctccgagcctgccactagcggctccgagactccgggaacttccgagagcgctacaccagaaagcggacccggaaccagtaccgaacctagcgagggctctgctccgggcagcccagccggctctcctacatccacggaggagggcacttccgaatccgccaccccggagtcagggccaggatctgaacccgctacctcaggcagtgagacgccaggaacgagcgagtccgctacaccggagagtgggccagggagccctgctggatctcctacgtccactgaggaagggtcaccagcgggctcgcccaccagcactgaagaaggtgcctcgagcagtgatctcggtgagctgcctgtggacgcaagatttcctcctagagtgccaaaatcttttccattcaacacctcagtcgtgtacaaaaagactctgtttgtagaattcacggatcaccttttcaacatcgctaagccaaggccaccctggatgggtctgctaggtcctaccatccaggctgaggtttatgatacagtggtcattacacttaagaacatggcttcccatcctgtcagtcttcatgctgttggtgtatcctactggaaagcttctgagggagctgaatatgatgatcagaccagtcaaagggagaaagaagatgataaagtcttccctggtggaagccatacatatgtctggcaggtcctgaaagagaatggtccaatggcctctgacccactgtgccttacctactcatatctttctcatgtggacctggtaaaagacttgaattcaggcctcattggagccctactagtatgtagagaagggagtctggccaaggaaaagacacagaccttgcacaaatttatactactttttgctgtatttgatgaagggaaaagttggcactcagaaacaaagaactccttgatgcaggatagggatgctgcatctgctcgggcctggcctaaaatgcacacagtcaatggttatgtaaacaggtctctgccaggtctgattggatgccacaggaaatcagtctattggcatgtgattggaatgggcaccactcctgaagtgcactcaatattcctcgaaggtcacacatttcttgtgaggaaccatcgccaggctagcttggaaatctcgccaataactttccttactgctcaaacactcttgatggaccttggacagtttctactgttttgtcatatctcttcccaccaacatgatggcatggaagcttatgtcaaagtagacagctgtccagaggaaccccaactacgaatgaaaaataatgaagaagcggaagactatgatgatgatcttactgattctgaaatggatgtggtcaggtttgatgatgacaactctccttcctttatccaaattcgctcagttgccaagaagcatcctaaaacttgggtacattacattgctgctgaagaggaggactgggactatgctcccttagtcctcgcccccgatgacagaagttataaaagtcaatatttgaacaatggccctcagcggattggtaggaagtacaaaaaagtccgatttatggcatacacagatgaaacctttaagactcgtgaagctattcagcatgaatcaggaatcttgggacctttactttatggggaagttggagacacactgttgattatatttaagaatcaagcaagcagaccatataacatctaccctcacggaatcactgatgtccgtcctttgtattcaaggagattaccaaaaggtgtaaaacatttgaaggattttccaattctgccaggagaaatattcaaatataaatggacagtgactgtagaagatgggccaactaaatcagatcctcggtgcctgacccgctattactctagtttcgttaatatggagagagatctagcttcaggactcattggccctctcctcatctgctacaaagaatctgtagatcaaagaggaaaccagataatgtcagacaagaggaatgtcatcctgttttctgtatttgatgagaaccgaagctggtacctcacagagaatatacaacgctttctccccaatccagctggagtgcagcttgaggatccagagttccaagcctccaacatcatgcacagcatcaatggctatgtttttgatagtttgcagttgtcagtttgtttgcatgaggtggcatactggtacattctaagcattggagcacagactgacttcctttctgtcttcttctctggatataccttcaaacacaaaatggtctatgaagacacactcaccctattcccattctcaggagaaactgtcttcatgtcgatggaaaacccaggtctatggattctggggtgccacaactcagactttcggaacagaggcatgaccgccttactgaaggtttctagttgtgacaagaacactggtgattattacgaggacagttatgaagatatttcagcatacttgctgagtaaaaacaatgccattgaaccaagaagcttctctcaaaacggcgcgccaagtcccgctggaagcccaactagcaccgaagaggggacctcagagtccgccacccccgagtccggccctggctctgagcctgccactagcggctccgagactcctggcacatccgaaagcgctacacccgagagtggacccggcacctctaccgagcccagtgagggctccgcccctggaacaagcaccgagcccagcgaaggcagcgccccagggacctccacagagcccagtgaaggcagtgctcctggcaccagcaccgaaccaagcgagggctctgcacccgggacctccaccgagccaagcgaaggctctgcccctggcacttccaccgagcccagcgaaggcagcgcccctgggagccccgctggctctcccaccagcactgaggagggcacatctaccgaaccaagtgaaggctctgcaccaggtgcctcgagcccaccagtcttgaaacgccatcaagctgaaataactcgtactactcttcagtcagatcaagaggaaatcgattatgatgataccatatcagttgaaatgaagaaggaagattttgacatttatgatgaggatgaaaatcagagcccccgcagctttcaaaagaaaacacgacactattttattgctgcagtggagaggctctgggattatgggatgagtagctccccacatgttctaagaaacagggctcagggcgcgccaggtacacccggatcgggtacagcgtcatcgagccccggtgcgtcacctggtacgtcgagcacggggtcgccaggggcgtcccctgggacgtcctcaacaggctcgcccggtgcgtcacccggcacgtcgtccacgggttcacctggtagctccccttccgcgtccactggcaccgggcctggaactccggggagcggcacagcgagctcgtcgccgggagcatcgcctgggacatcgagcaccgggtcgccaggagcatcgcccggaacatccagcacaggaagccccggcgcgtcgcccgggacatcaagcacaggttccccgggatcgagcacgccgtccggagccactggatcaccagggagctcgacaccttccggcgcaacgggatcgcccggagccagcccgggtacgtcaagcactggctcccctgcctcgagcagggctcagagtggcagtgtccctcagttcaagaaagttgttttccaggaatttactgatggctcctttactcagcccttataccgtggagaactaaatgaacatttgggactcctggggccatatataagagcagaagttgaagataatatcatggtaactttcagaaatcaggcctctcgtccctattccttctattctagccttatttcttatgaggaagatcagaggcaaggagcagaacctagaaaaaactttgtcaagcctaatgaaaccaaaacttacttttggaaagtgcaacatcatatggcacccactaaagatgagtttgactgcaaagcctgggcttatttctctgatgttgacctggaaaaagatgtgcactcaggcctgattggaccccttctggtctgccacactaacacactgaaccctgctcatgggagacaagtgacagtacaggaatttgctctgtttttcaccatctttgatgagaccaaaagctggtacttcactgaaaatatggaaagaaactgcagggctccctgcaatatccagatggaagatcccacttttaaagagaattatcgcttccatgcaatcaatggctacataatggatacactacctggcttagtaatggctcaggatcaaaggattcgatggtatctgctcagcatgggcagcaatgaaaacatccattctattcatttcagtggacatgtgttcactgtacgaaaaaaagaggagtataaaatggcactgtacaatctctatccaggtgtttttgagacagtggaaatgttaccatccaaagctggaatttggcgggtggaatgccttattggcgagcatctacatgctgggatgagcacactttttctggtgtacagcaataagtgtcagactcccctgggaatggcttctggacacattagagattttcagattacagcttcaggacaatatggacagtgggccccaaagctggccagacttcattattccggatcaatcaatgcctggagcaccaaggagcccttttcttggatcaaggtggatctgttggcaccaatgattattcacggcatcaagacccagggtgcccgtcagaagttctccagcctctacatctctcagtttatcatcatgtatagtcttgatgggaagaagtggcagacttatcgaggaaattccactggaaccttaatggtcttctttggcaatgtggattcatctgggataaaacacaatatttttaaccctccaattattgctcgatacatccgtttgcacccaactcattatagcattcgcagcactcttcgcatggagttgatgggctgtgatttaaatagttgcagcatgccattgggaatggagagtaaagcaatatcagatgcacagattactgcttcatcctactttaccaatatgtttgccacctggtctccttcaaaagctcgacttcacctccaagggaggagtaatgcctggagacctcaggtgaataatccaaaagagtggctgcaagtggacttccagaagacaatgaaagtcacaggagtaactactcagggagtaaaatctctgcttaccagcatgtatgtgaaggagttcctcatctccagcagtcaagatggccatcagtggactctcttttttcagaatggcaaagtaaaggtttttcagggaaatcaagactccttcacacctgtggtgaactctctagacccaccgttactgactcgctaccttcgaattcacccccagagttgggtgcaccagattgccctgaggatggaggttctgggctgcgaggcacaggacctctacggcgcgccaggtacctcagagtctgctacccccgagtcagggccaggatcagagccagccacctccgggtctgagacacccgggacttccgagagtgccacccctgagtccggacccgggtccgagcccgccacttccggctccgaaactcccggcacaagcgagagcgctaccccagagtcaggaccaggaacatctacagagccctctgaaggctccgctccagggtccccagccggcagtcccactagcaccgaggagggaacctctgaaagcgccacacccgaatcagggccagggtctgagcctgctaccagcggcagcgagacaccaggcacctctgagtccgccacaccagagtccggacccggatctcccgctgggagccccacctccactgaggagggatctcctgctggctctccaacatctactgaggaaggtacctcaaccgagccatccgagggatcagctcccggcacctcagagtcggcaaccccggagtctggacccggaacttccgaaagtgccacaccagagtccggtcccgggacttcagaatcagcaacacccgagtccggccctgggtctgaacccgccacaagtggtagtgagacaccaggatcagaacctgctacctcagggtcagagacacccggatctccggcaggctcaccaacctccactgaggagggcaccagcacagaaccaagcgagggctccgcacccggaacaagcactgaacccagtgagggttcagcacccggctctgagccggccacaagtggcagtgagacacccggcacttcagagagtgccacccccgagagtggcccaggcactagtaccgagccctctgaaggcagtgcgccagcctcgagcgaacaaaaactcatctcagaagaggatctgtcacctgcaaccggtcatcatcaccatcaccattga

SEQ ID NO: 1245 - protein, 2206 aa, synthetic construct
  REGION 1..2206: note = Description of Artificial Sequence: Synthetic polypeptide
ATRRYYLGAVELSWDYMQSDLGELPVDARFPPRVPKSFPFGAPGSSPSASTGTGPGSSPSASTGTGPGASPGTSSTGSPGASPGTSSTGSPGSSTPSGATGSPGSSPSASTGTGPGASPGTSSTGSPGSSPSASTGTGPGTPGSGTASSSPGSSTPSGATGSPGSSTPSGATGSPGASPGTSSTGSPASSNTSVVYKKTLFVEFTDHLFNIAKPRPPWMGLLGPTIQAEVYDTVVITLKNMASHPVSLHAVGVSYWKASEGAEYDDQTSQREKEDDKVFPGGSHTYVWQVLKENGPMASDPLCLTYSYLSHVDLVKDLNSGLIGALLVCREGSLAKEKTQTLHKFILLFAVFDEGKSWHSETKNSLMQDRDAASARAWPKMHTVNGYVNRSLPGLIGCHRKSVYWHVIGMGTTPEVHSIFLEGHTFLVRNHRQASLEISPITFLTAQTLLMDLGQFLLFCHISSHQHDGMEAYVKVDSCPEEPQLRMKNNEEAEDYDDDLTDSEMDVVRFDDDNSPSFIQIRSVAKKHPKTWVHYIAAEEEDWDYAPLVLAPDDRSYKSQYLNNGPQRIGRKYKKVRFMAYTDETFKTREAIQHESGILGPLLYGEVGDTLLIIFKNQASRPYNIYPHGITDVRPLYSRRLPKGVKHLKDFPILPGEIFKYKWTVTVEDGPTKSDPRCLTRYYSSFVNMERDLASGLIGPLLICYKESVDQRGNQIMSDKRNVILFSVFDENRSWYLTENIQRFLPNPAGVQLEDPEFQASNIMHSINGYVFDSLQLSVCLHEVAYWYILSIGAQTDFLSVFFSGYTFKHKMVYEDTLTLFPFSGETVFMSMENPGLWILGCHNSDFRNRGMTALLKVSSCDKNTGDYYEDSYEDISAYLLSKNNAIEPRSFSQNGAPSPAGSPTSTEEGTSESATPESGPGSEPATSGSETPGTSESATPESGPGTSTEPSEGSAPGTSTEPSEGSAPGTSTEPSEGSAPGTSTEPSEGSAPGTSTEPSEGSAPGTSTEPSEGSAPGSPAGSPTSTEEGTSTEPSEGSAPGASSPPVLKRHQAEITRTTLQSDQEEIDYDDTISVEMKKEDFDIYDEDENQSPRSFQKKTRHYFIAAVERLWDYGMSSSPHVLRNRAQGAPGTPGSGTASSSPGASPGTSSTGSPGASPGTSSTGSPGASPGTSSTGSPGSSPSASTGTGPGTPGSGTASSSPGASPGTSSTGSPGASPGTSSTGSPGASPGTSSTGSPGSSTPSGATGSPGSSTPSGATGSPGASPGTSSTGSPASSRAQSGSVPQFKKVVFQEFTDGSFTQPLYRGELNEHLGLLGPYIRAEVEDNIMVTFRNQASRPYSFYSSLISYEEDQRQGAEPRKNFVKPNETKTYFWKVQHHMAPTKDEFDCKAWAYFSDVDLEKDVHSGLIGPLLVCHTNTLNPAHGRQVTVQEFALFFTIFDETKSWYFTENMERNCRAPCNIQMEDPTFKENYRFHAINGYIMDTLPGLVMAQDQRIRWYLLSMGSNENIHSIHFSGHVFTVRKKEEYKMALYNLYPGVFETVEMLPSKAGIWRVECLIGEHLHAGMSTLFLVYSNKCQTPLGMASGHIRDFQITASGQYGQWAPKLARLHYSGSINAWSTKEPFSWIKVDLLAPMIIHGIKTQGARQKFSSLYISQFIIMYSLDGKKWQTYRGNSTGTLMVFFGNVDSSGIKHNIFNPPIIARYIRLHPTHYSIRSTLRMELMGCDLNSCSMPLGMESKAISDAQITASSYFTNMFATWSPSKARLHLQGRSNAWRPQVNNPKEWLQVDFQKTMKVTGVTTQGVKSLLTSMYVKEFLISSSQDGHQWTLFFQNGKVKVFQGNQDSFTPVVNSLDPPLLTRYLRIHPQSWVHQIALRMEVLGCEAQDLYGAPGTSESATPESGPGSEPATSGSETPGTSESATPESGPGSEPATSGSETPGTSESATPESGPGTSTEPSEGSAPGSPAGSPTSTEEGTSESATPESGPGSEPATSGSETPGTSESATPESGPGSPAGSPTSTEEGSPAGSPTSTEEGTSTEPSEGSAPGTSESATPESGPGTSESATPESGPGTSESATPESGPGSEPATSGSETPGSEPATSGSETPGSPAGSPTSTEEGTSTEPSEGSAPGTSTEPSEGSAPGSEPATSGSETPGTSESATPESGPGTSTEPSEGSAPASSEQKLISEEDLSPATGHHHHHH

SEQ ID NO: 1246 - DNA, 6621 bp, synthetic construct
  misc_feature 1..6621: note = Description of Artificial Sequence: Synthetic polynucleotide
  source 1..6621: mol_type = other DNA
gccaccagaagatactacctgggtgcagtggaactgtcatgggactatatgcaaagtgatctcggtgagctgcctgtggacgcaagatttcctcctagagtgccaaaatcttttccattcggcgcgccaggctccagcccctccgcgagcacgggaaccggaccaggttcgtcaccctcagcatcaacggggacgggaccgggggcgtcaccaggaacgtcctccaccggctcgccgggtgcatcacccggaacgtcatcgaccggatcgccagggagctcgacgccatcaggcgcaacaggatcacctggctcaagccctagcgcgtcaaccggcacgggtccgggtgcctcccctggcacgtccagcaccggatcacccggatcgagcccatccgcctcaaccggaaccggacccggtacaccagggtcgggaacagcctcctcgtcaccaggctcctcaaccccctcgggagccacgggttcgcccggttcgtcaacgccttccggagcaactggtagccccggagcatcgccaggaacttcgagcacggggtcgcccgcctcgagcaacacctcagtcgtgtacaaaaagactctgtttgtagaattcacggatcaccttttcaacatcgctaagccaaggccaccctggatgggtctgctaggtcctaccatccaggctgaggtttatgatacagtggtcattacacttaagaacatggcttcccatcctgtcagtcttcatgctgttggtgtatcctactggaaagcttctgagggagctgaatatgatgatcagaccagtcaaagggagaaagaagatgataaagtcttccctggtggaagccatacatatgtctggcaggtcctgaaagagaatggtccaatggcctctgacccactgtgccttacctactcatatctttctcatgtggacctggtaaaagacttgaattcaggcctcattggagccctactagtatgtagagaagggagtctggccaaggaaaagacacagaccttgcacaaatttatactactttttgctgtatttgatgaagggaaaagttggcactcagaaacaaagaactccttgatgcaggatagggatgctgcatctgctcgggcctggcctaaaatgcacacagtcaatggttatgtaaacaggtctctgccaggtctgattggatgccacaggaaatcagtctattggcatgtgattggaatgggcaccactcctgaagtgcactcaatattcctcgaaggtcacacatttcttgtgaggaaccatcgccaggctagcttggaaatctcgccaataactttccttactgctcaaacactcttgatggaccttggacagtttctactgttttgtcatatctcttcccaccaacatgatggcatggaagcttatgtcaaagtagacagctgtccagaggaaccccaactacgaatgaaaaataatgaagaagcggaagactatgatgatgatcttactgattctgaaatggatgtggtcaggtttgatgatgacaactctccttcctttatccaaattcgctcagttgccaagaagcatcctaaaacttgggtacattacattgctgctgaagaggaggactgggactatgctcccttagtcctcgcccccgatgacagaagttataaaagtcaatatttgaacaatggccctcagcggattggtaggaagtacaaaaaagtccgatttatggcatacacagatgaaacctttaagactcgtgaagctattcagcatgaatcaggaatcttgggacctttactttatggggaagttggagacacactgttgattatatttaagaatcaagcaagcagaccatataacatctaccctcacggaatcactgatgtccgtcctttgtattcaaggagattaccaaaaggtgtaaaacatttgaaggattttccaattctgccaggagaaatattcaaatataaatggacagtgactgtagaagatgggccaactaaatcagatcctcggtgcctgacccgctattactctagtttcgttaatatggagagagatctagcttcaggactcattggccctctcctcatctgctacaaagaatctgtagatcaaagaggaaaccagataatgtcagacaagaggaatgtcatcctgttttctgtatttgatgagaaccgaagctggtacctcacagagaatatacaacgctttctccccaatccagctggagtgcagcttgaggatccagagttccaagcctccaacatcatgcacagcatcaatggctatgtttttgatagtttgcagttgtcagtttgtttgcatgaggtggcatactggtacattctaagcattggagcacagactgacttcctttctgtcttcttctctggatataccttcaaacacaaaatggtctatgaagacacactcaccctattcccattctcaggagaaactgtcttcatgtcgatggaaaacccaggtctatggattctggggtgccacaactcagactttcggaacagaggcatgaccgccttactgaaggtttctagttgtgacaagaacactggtgattattacgaggacagttatgaagatatttcagcatacttgctgagtaaaaacaatgccattgaaccaagaagcttctctcaaaacggcgcgccaagtcccgctggaagcccaactagcaccgaagaggggacctcagagtccgccacccccgagtccggccctggctctgagcctgccactagcggctccgagactcctggcacatccgaaagcgctacacccgagagtggacccggcacctctaccgagcccagtgagggctccgcccctggaacaagcaccgagcccagcgaaggcagcgccccagggacctccacagagcccagtgaaggcagtgctcctggcaccagcaccgaaccaagcgagggctctgcacccgggacctccaccgagccaagcgaaggctctgcccctggcacttccaccgagcccagcgaaggcagcgcccctgggagccccgctggctctcccaccagcactgaggagggcacatctaccgaaccaagtgaaggctctgcaccaggtgcctcgagcccaccagtcttgaaacgccatcaagctgaaataactcgtactactcttcagtcagatcaagaggaaatcgattatgatgataccatatcagttgaaatgaagaaggaagattttgacatttatgatgaggatgaaaatcagagcccccgcagctttcaaaagaaaacacgacactattttattgctgcagtggagaggctctgggattatgggatgagtagctccccacatgttctaagaaacagggctcagggcgcgccaggtacacccggatcgggtacagcgtcatcgagccccggtgcgtcacctggtacgtcgagcacggggtcgccaggggcgtcccctgggacgtcctcaacaggctcgcccggtgcgtcacccggcacgtcgtccacgggttcacctggtagctccccttccgcgtccactggcaccgggcctggaactccggggagcggcacagcgagctcgtcgccgggagcatcgcctgggacatcgagcaccgggtcgccaggagcatcgcccggaacatccagcacaggaagccccggcgcgtcgcccgggacatcaagcacaggttccccgggatcgagcacgccgtccggagccactggatcaccagggagctcgacaccttccggcgcaacgggatcgcccggagccagcccgggtacgtcaagcactggctcccctgcctcgagcagggctcagagtggcagtgtccctcagttcaagaaagttgttttccaggaatttactgatggctcctttactcagcccttataccgtggagaactaaatgaacatttgggactcctggggccatatataagagcagaagttgaagataatatcatggtaactttcagaaatcaggcctctcgtccctattccttctattctagccttatttcttatgaggaagatcagaggcaaggagcagaacctagaaaaaactttgtcaagcctaatgaaaccaaaacttacttttggaaagtgcaacatcatatggcacccactaaagatgagtttgactgcaaagcctgggcttatttctctgatgttgacctggaaaaagatgtgcactcaggcctgattggaccccttctggtctgccacactaacacactgaaccctgctcatgggagacaagtgacagtacaggaatttgctctgtttttcaccatctttgatgagaccaaaagctggtacttcactgaaaatatggaaagaaactgcagggctccctgcaatatccagatggaagatcccacttttaaagagaattatcgcttccatgcaatcaatggctacataatggatacactacctggcttagtaatggctcaggatcaaaggattcgatggtatctgctcagcatgggcagcaatgaaaacatccattctattcatttcagtggacatgtgttcactgtacgaaaaaaagaggagtataaaatggcactgtacaatctctatccaggtgtttttgagacagtggaaatgttaccatccaaagctggaatttggcgggtggaatgccttattggcgagcatctacatgctgggatgagcacactttttctggtgtacagcaataagtgtcagactcccctgggaatggcttctggacacattagagattttcagattacagcttcaggacaatatggacagtgggccccaaagctggccagacttcattattccggatcaatcaatgcctggagcaccaaggagcccttttcttggatcaaggtggatctgttggcaccaatgattattcacggcatcaagacccagggtgcccgtcagaagttctccagcctctacatctctcagtttatcatcatgtatagtcttgatgggaagaagtggcagacttatcgaggaaattccactggaaccttaatggtcttctttggcaatgtggattcatctgggataaaacacaatatttttaaccctccaattattgctcgatacatccgtttgcacccaactcattatagcattcgcagcactcttcgcatggagttgatgggctgtgatttaaatagttgcagcatgccattgggaatggagagtaaagcaatatcagatgcacagattactgcttcatcctactttaccaatatgtttgccacctggtctccttcaaaagctcgacttcacctccaagggaggagtaatgcctggagacctcaggtgaataatccaaaagagtggctgcaagtggacttccagaagacaatgaaagtcacaggagtaactactcagggagtaaaatctctgcttaccagcatgtatgtgaaggagttcctcatctccagcagtcaagatggccatcagtggactctcttttttcagaatggcaaagtaaaggtttttcagggaaatcaagactccttcacacctgtggtgaactctctagacccaccgttactgactcgctaccttcgaattcacccccagagttgggtgcaccagattgccctgaggatggaggttctgggctgcgaggcacaggacctctacggcgcgccaggtacctcagagtctgctacccccgagtcagggccaggatcagagccagccacctccgggtctgagacacccgggacttccgagagtgccacccctgagtccggacccgggtccgagcccgccacttccggctccgaaactcccggcacaagcgagagcgctaccccagagtcaggaccaggaacatctacagagccctctgaaggctccgctccagggtccccagccggcagtcccactagcaccgaggagggaacctctgaaagcgccacacccgaatcagggccagggtctgagcctgctaccagcggcagcgagacaccaggcacctctgagtccgccacaccagagtccggacccggatctcccgctgggagccccacctccactgaggagggatctcctgctggctctccaacatctactgaggaaggtacctcaaccgagccatccgagggatcagctcccggcacctcagagtcggcaaccccggagtctggacccggaacttccgaaagtgccacaccagagtccggtcccgggacttcagaatcagcaacacccgagtccggccctgggtctgaacccgccacaagtggtagtgagacaccaggatcagaacctgctacctcagggtcagagacacccggatctccggcaggctcaccaacctccactgaggagggcaccagcacagaaccaagcgagggctccgcacccggaacaagcactgaacccagtgagggttcagcacccggctctgagccggccacaagtggcagtgagacacccggcacttcagagagtgccacccccgagagtggcccaggcactagtaccgagccctctgaaggcagtgcgccagcctcgagcgaacaaaaactcatctcagaagaggatctgtcacctgcaaccggtcatcatcaccatcaccattga

SEQ ID NO: 1247 - protein, 2203 aa, synthetic construct
  REGION 1..2203: note = Description of Artificial Sequence: Synthetic polypeptide
ATRRYYLGAVELSWDYMQGAPTSESATPESGPGSEPATSGSETPGTSESATPESGPGSEPATSGSETPGTSESATPESGPGTSTEPSEGSAPGSPAGSPTSTEEGTSESATPESGPGSEPATSGSETPGTSESATPESGPGSPAGSPTSTEEGSPAGSPTSTEEGASSSDLGELPVDARFPPRVPKSFPFNTSVVYKKTLFVEFTDHLFNIAKPRPPWMGLLGPTIQAEVYDTVVITLKNMASHPVSLHAVGVSYWKASEGAEYDDQTSQREKEDDKVFPGGSHTYVWQVLKENGPMASDPLCLTYSYLSHVDLVKDLNSGLIGALLVCREGSLAKEKTQTLHKFILLFAVFDEGKSWHSETKNSLMQDRDAASARAWPKMHTVNGYVNRSLPGLIGCHRKSVYWHVIGMGTTPEVHSIFLEGHTFLVRNHRQASLEISPITFLTAQTLLMDLGQFLLFCHISSHQHDGMEAYVKVDSCPEEPQLRMKNNEEAEDYDDDLTDSEMDVVRFDDDNSPSFIQIRSVAKKHPKTWVHYIAAEEEDWDYAPLVLAPDDRSYKSQYLNNGPQRIGRKYKKVRFMAYTDETFKTREAIQHESGILGPLLYGEVGDTLLIIFKNQASRPYNIYPHGITDVRPLYSRRLPKGVKHLKDFPILPGEIFKYKWTVTVEDGPTKSDPRCLTRYYSSFVNMERDLASGLIGPLLICYKESVDQRGNQIMSDKRNVILFSVFDENRSWYLTENIQRFLPNPAGVQLEDPEFQASNIMHSINGYVFDSLQLSVCLHEVAYWYILSIGAQTDFLSVFFSGYTFKHKMVYEDTLTLFPFSGETVFMSMENPGLWILGCHNSDFRNRGMTALLKVSSCDKNTGDYYEDSYEDISAYLLSKNNAIEPRSFSQNGAPSPAGSPTSTEEGTSESATPESGPGSEPATSGSETPGTSESATPESGPGTSTEPSEGSAPGTSTEPSEGSAPGTSTEPSEGSAPGTSTEPSEGSAPGTSTEPSEGSAPGTSTEPSEGSAPGSPAGSPTSTEEGTSTEPSEGSAPGASSPPVLKRHQAEITRTTLQSDQEEIDYDDTISVEMKKEDFDIYDEDENQSPRSFQKKTRHYFIAAVERLWDYGMSSSPHVLRNRAQSGSVPQFKKVVFQEFTDGSFTQPLYRGELNEHLGLLGPYIRAEVEDNIMVTFRNQASRPYSFYSSLISYEEDQRQGAEPRKNFVKPNETKTYFWKVQHHMAPTKDEFDCKAWAYFSDVDLEKDVHSGLIGPLLVCHTNTLNPAHGRQVTVQEFALFFTIFDETKSWYFTENMERNCRGAPSPAGSPTSTEEGTSESATPESGPGTSTEPSEGSAPGSPAGSPTSTEEGTSTEPSEGSAPGTSTEPSEGSAPGTSESATPESGPGSEPATSGSETPGSEPATSGSETPGSPAGSPTSTEEGTSESATPESGPGTSTEPSEGSAPGASSAPCNIQMEDPTFKENYRFHAINGYIMDTLPGLVMAQDQRIRWYLLSMGSNENIHSIHFSGHVFTVRKKEEYKMALYNLYPGVFETVEMLPSKAGIWRVECLIGEHLHAGMSTLFLVYSNKCQTPLGMASGHIRDFQITASGQYGQWAPKLARLHYSGSINAWSTKEPFSWIKVDLLAPMIIHGIKTQGARQKFSSLYISQFIIMYSLDGKKWQTYRGNSTGTLMVFFGNVDSSGIKHNIFNPPIIARYIRLHPTHYSIRSTLRMELMGCDLNSCSMPLGMESKAISDAQITASSYFTNMFATWSPSKARLHLQGRSNAWRPQVNNPKEWLQVDFQKTMKVTGVTTQGVKSLLTSMYVKEFLISSSQDGHQWTLFFQNGKVKVFQGNQDSFTPVVNSLDPPLLTRYLRIHPQSWVHQIALRMEVLGCEAQDLYGAPGTSESATPESGPGSEPATSGSETPGTSESATPESGPGSEPATSGSETPGTSESATPESGPGTSTEPSEGSAPGSPAGSPTSTEEGTSESATPESGPGSEPATSGSETPGTSESATPESGPGSPAGSPTSTEEGSPAGSPTSTEEGTSTEPSEGSAPGTSESATPESGPGTSESATPESGPGTSESATPESGPGSEPATSGSETPGSEPATSGSETPGSPAGSPTSTEEGTSTEPSEGSAPGTSTEPSEGSAPGSEPATSGSETPGTSESATPESGPGTSTEPSEGSAPASSEQKLISEEDLSPATGHHHHHH

SEQ ID NO: 1248 - DNA, 6612 bp, synthetic construct
  misc_feature 1..6612: note = Description of Artificial Sequence: Synthetic polynucleotide
  source 1..6612: mol_type = other DNA
gccaccagaagatactacctgggtgcagtggaactgtcatgggactatatgcaaggcgcgccaacatcagagagcgccacccctgaaagtggtcccgggagcgagccagccacatctgggtcggaaacgccaggcacaagtgagtctgcaactcccgagtccggacctggctccgagcctgccactagcggctccgagactccgggaacttccgagagcgctacaccagaaagcggacccggaaccagtaccgaacctagcgagggctctgctccgggcagcccagccggctctcctacatccacggaggagggcacttccgaatccgccaccccggagtcagggccaggatctgaacccgctacctcaggcagtgagacgccaggaacgagcgagtccgctacaccggagagtgggccagggagccctgctggatctcctacgtccactgaggaagggtcaccagcgggctcgcccaccagcactgaagaaggtgcctcgagcagtgatctcggtgagctgcctgtggacgcaagatttcctcctagagtgccaaaatcttttccattcaacacctcagtcgtgtacaaaaagactctgtttgtagaattcacggatcaccttttcaacatcgctaagccaaggccaccctggatgggtctgctaggtcctaccatccaggctgaggtttatgatacagtggtcattacacttaagaacatggcttcccatcctgtcagtcttcatgctgttggtgtatcctactggaaagcttctgagggagctgaatatgatgatcagaccagtcaaagggagaaagaagatgataaagtcttccctggtggaagccatacatatgtctggcaggtcctgaaagagaatggtccaatggcctctgacccactgtgccttacctactcatatctttctcatgtggacctggtaaaagacttgaattcaggcctcattggagccctactagtatgtagagaagggagtctggccaaggaaaagacacagaccttgcacaaatttatactactttttgctgtatttgatgaagggaaaagttggcactcagaaacaaagaactccttgatgcaggatagggatgctgcatctgctcgggcctggcctaaaatgcacacagtcaatggttatgtaaacaggtctctgccaggtctgattggatgccacaggaaatcagtctattggcatgtgattggaatgggcaccactcctgaagtgcactcaatattcctcgaaggtcacacatttcttgtgaggaaccatcgccaggctagcttggaaatctcgccaataactttccttactgctcaaacactcttgatggaccttggacagtttctactgttttgtcatatctcttcccaccaacatgatggcatggaagcttatgtcaaagtagacagctgtccagaggaaccccaactacgaatgaaaaataatgaagaagcggaagactatgatgatgatcttactgattctgaaatggatgtggtcaggtttgatgatgacaactctccttcctttatccaaattcgctcagttgccaagaagcatcctaaaacttgggtacattacattgctgctgaagaggaggactgggactatgctcccttagtcctcgcccccgatgacagaagttataaaagtcaatatttgaacaatggccctcagcggattggtaggaagtacaaaaaagtccgatttatggcatacacagatgaaacctttaagactcgtgaagctattcagcatgaatcaggaatcttgggacctttactttatggggaagttggagacacactgttgattatatttaagaatcaagcaagcagaccatataacatctaccctcacggaatcactgatgtccgtcctttgtattcaaggagattaccaaaaggtgtaaaacatttgaaggattttccaattctgccaggagaaatattcaaatataaatggacagtgactgtagaagatgggccaactaaatcagatcctcggtgcctgacccgctattactctagtttcgttaatatggagagagatctagcttcaggactcattggccctctcctcatctgctacaaagaatctgtagatcaaagaggaaaccagataatgtcagacaagaggaatgtcatcctgttttctgtatttgatgagaaccgaagctggtacctcacagagaatatacaacgctttctccccaatccagctggagtgcagcttgaggatccagagttccaagcctccaacatcatgcacagcatcaatggctatgtttttgatagtttgcagttgtcagtttgtttgcatgaggtggcatactggtacattctaagcattggagcacagactgacttcctttctgtcttcttctctggatataccttcaaacacaaaatggtctatgaagacacactcaccctattcccattctcaggagaaactgtcttcatgtcgatggaaaacccaggtctatggattctggggtgccacaactcagactttcggaacagaggcatgaccgccttactgaaggtttctagttgtgacaagaacactggtgattattacgaggacagttatgaagatatttcagcatacttgctgagtaaaaacaatgccattgaaccaagaagcttctctcaaaacggcgcgccaagtcccgctggaagcccaactagcaccgaagaggggacctcagagtccgccacccccgagtccggccctggctctgagcctgccactagcggctccgagactcctggcacatccgaaagcgctacacccgagagtggacccggcacctctaccgagcccagtgagggctccgcccctggaacaagcaccgagcccagcgaaggcagcgccccagggacctccacagagcccagtgaaggcagtgctcctggcaccagcaccgaaccaagcgagggctctgcacccgggacctccaccgagccaagcgaaggctctgcccctggcacttccaccgagcccagcgaaggcagcgcccctgggagccccgctggctctcccaccagcactgaggagggcacatctaccgaaccaagtgaaggctctgcaccaggtgcctcgagcccaccagtcttgaaacgccatcaagctgaaataactcgtactactcttcagtcagatcaagaggaaatcgattatgatgataccatatcagttgaaatgaagaaggaagattttgacatttatgatgaggatgaaaatcagagcccccgcagctttcaaaagaaaacacgacactattttattgctgcagtggagaggctctgggattatgggatgagtagctccccacatgttctaagaaacagggctcagagtggcagtgtccctcagttcaagaaagttgttttccaggaatttactgatggctcctttactcagcccttataccgtggagaactaaatgaacatttgggactcctggggccatatataagagcagaagttgaagataatatcatggtaactttcagaaatcaggcctctcgtccctattccttctattctagccttatttcttatgaggaagatcagaggcaaggagcagaacctagaaaaaactttgtcaagcctaatgaaaccaaaacttacttttggaaagtgcaacatcatatggcacccactaaagatgagtttgactgcaaagcctgggcttatttctctgatgttgacctggaaaaagatgtgcactcaggcctgattggaccccttctggtctgccacactaacacactgaaccctgctcatgggagacaagtgacagtacaggaatttgctctgtttttcaccatctttgatgagaccaaaagctggtacttcactgaaaatatggaaagaaactgcaggggcgcgccatctccagccgggtccccaacttcgaccgaggaagggacctccgagtcagctaccccggagtccggtcctggcacctccaccgaaccatcggagggcagcgcccctgggagccctgccgggagccctacaagcaccgaagagggcaccagtacagagccaagtgaggggagcgcccctggtactagtactgaaccatccgaggggtcagctccaggcacgagtgagtccgctacccccgagagcggaccgggctcagagcccgccacgagtggcagtgaaactccaggctcagaacccgccactagtgggtcagagactccaggcagccctgccggatcccctacgtccaccgaggagggaacatctgagtccgcaacacccgaatccggtccaggcacctccacggaacctagtgaaggctcggcaccaggtgcctcgagcgctccctgcaatatccagatggaagatcccacttttaaagagaattatcgcttccatgcaatcaatggctacataatggatacactacctggcttagtaatggctcaggatcaaaggattcgatggtatctgctcagcatgggcagcaatgaaaacatccattctattcatttcagtggacatgtgttcactgtacgaaaaaaagaggagtataaaatggcactgtacaatctctatccaggtgtttttgagacagtggaaatgttaccatccaaagctggaatttggcgggtggaatgccttattggcgagcatctacatgctgggatgagcacactttttctggtgtacagcaataagtgtcagactcccctgggaatggcttctggacacattagagattttcagattacagcttcaggacaatatggacagtgggccccaaagctggccagacttcattattccggatcaatcaatgcctggagcaccaaggagcccttttcttggatcaaggtggatctgttggcaccaatgattattcacggcatcaagacccagggtgcccgtcagaagttctccagcctctacatctctcagtttatcatcatgtatagtcttgatgggaagaagtggcagacttatcgaggaaattccactggaaccttaatggtcttctttggcaatgtggattcatctgggataaaacacaatatttttaaccctccaattattgctcgatacatccgtttgcacccaactcattatagcattcgcagcactcttcgcatggagttgatgggctgtgatttaaatagttgcagcatgccattgggaatggagagtaaagcaatatcagatgcacagattactgcttcatcctactttaccaatatgtttgccacctggtctccttcaaaagctcgacttcacctccaagggaggagtaatgcctggagacctcaggtgaataatccaaaagagtggctgcaagtggacttccagaagacaatgaaagtcacaggagtaactactcagggagtaaaatctctgcttaccagcatgtatgtgaaggagttcctcatctccagcagtcaagatggccatcagtggactctcttttttcagaatggcaaagtaaaggtttttcagggaaatcaagactccttcacacctgtggtgaactctctagacccaccgttactgactcgctaccttcgaattcacccccagagttgggtgcaccagattgccctgaggatggaggttctgggctgcgaggcacaggacctctacggcgcgccaggtacctcagagtctgctacccccgagtcagggccaggatcagagccagccacctccgggtctgagacacccgggacttccgagagtgccacccctgagtccggacccgggtccgagcccgccacttccggctccgaaactcccggcacaagcgagagcgctaccccagagtcaggaccaggaacatctacagagccctctgaaggctccgctccagggtccccagccggcagtcccactagcaccgaggagggaacctctgaaagcgccacacccgaatcagggccagggtctgagcctgctaccagcggcagcgagacaccaggcacctctgagtccgccacaccagagtccggacccggatctcccgctgggagccccacctccactgaggagggatctcctgctggctctccaacatctactgaggaaggtacctcaaccgagccatccgagggatcagctcccggcacctcagagtcggcaaccccggagtctggacccggaacttccgaaagtgccacaccagagtccggtcccgggacttcagaatcagcaacacccgagtccggccctgggtctgaacccgccacaagtggtagtgagacaccaggatcagaacctgctacctcagggtcagagacacccggatctccggcaggctcaccaacctccactgaggagggcaccagcacagaaccaagcgagggctccgcacccggaacaagcactgaacccagtgagggttcagcacccggctctgagccggccacaagtggcagtgagacacccggcacttcagagagtgccacccccgagagtggcccaggcactagtaccgagccctctgaaggcagtgcgccagcctcgagcgaacaaaaactcatctcagaagaggatctgtcacctgcaaccggtcatcatcaccatcaccattga

SEQ ID NO: 1249 - protein, 2203 aa, synthetic construct
  REGION 1..2203: note = Description of Artificial Sequence: Synthetic polypeptide
ATRRYYLGAVELSWDYMQSDLGELPVDARFPPRVPKSFPFGAPGSSPSASTGTGPGSSPSASTGTGPGASPGTSSTGSPGASPGTSSTGSPGSSTPSGATGSPGSSPSASTGTGPGASPGTSSTGSPGSSPSASTGTGPGTPGSGTASSSPGSSTPSGATGSPGSSTPSGATGSPGASPGTSSTGSPASSNTSVVYKKTLFVEFTDHLFNIAKPRPPWMGLLGPTIQAEVYDTVVITLKNMASHPVSLHAVGVSYWKASEGAEYDDQTSQREKEDDKVFPGGSHTYVWQVLKENGPMASDPLCLTYSYLSHVDLVKDLNSGLIGALLVCREGSLAKEKTQTLHKFILLFAVFDEGKSWHSETKNSLMQDRDAASARAWPKMHTVNGYVNRSLPGLIGCHRKSVYWHVIGMGTTPEVHSIFLEGHTFLVRNHRQASLEISPITFLTAQTLLMDLGQFLLFCHISSHQHDGMEAYVKVDSCPEEPQLRMKNNEEAEDYDDDLTDSEMDVVRFDDDNSPSFIQIRSVAKKHPKTWVHYIAAEEEDWDYAPLVLAPDDRSYKSQYLNNGPQRIGRKYKKVRFMAYTDETFKTREAIQHESGILGPLLYGEVGDTLLIIFKNQASRPYNIYPHGITDVRPLYSRRLPKGVKHLKDFPILPGEIFKYKWTVTVEDGPTKSDPRCLTRYYSSFVNMERDLASGLIGPLLICYKESVDQRGNQIMSDKRNVILFSVFDENRSWYLTENIQRFLPNPAGVQLEDPEFQASNIMHSINGYVFDSLQLSVCLHEVAYWYILSIGAQTDFLSVFFSGYTFKHKMVYEDTLTLFPFSGETVFMSMENPGLWILGCHNSDFRNRGMTALLKVSSCDKNTGDYYEDSYEDISAYLLSKNNAIEPRSFSQNGAPSPAGSPTSTEEGTSESATPESGPGSEPATSGSETPGTSESATPESGPGTSTEPSEGSAPGTSTEPSEGSAPGTSTEPSEGSAPGTSTEPSEGSAPGTSTEPSEGSAPGTSTEPSEGSAPGSPAGSPTSTEEGTSTEPSEGSAPGASSPPVLKRHQAEITRTTLQSDQEEIDYDDTISVEMKKEDFDIYDEDENQSPRSFQKKTRHYFIAAVERLWDYGMSSSPHVLRNRAQSGSVPQFKKVVFQEFTDGSFTQPLYRGELNEHLGLLGPYIRAEVEDNIMVTFRNQASRPYSFYSSLISYEEDQRQGAEPRKNFVKPNETKTYFWKVQHHMAPTKDEFDCKAWAYFSDVDLEKDVHSGLIGPLLVCHTNTLNPAHGRQVTVQEFALFFTIFDETKSWYFTENMERNCRGAPSPAGSPTSTEEGTSESATPESGPGTSTEPSEGSAPGSPAGSPTSTEEGTSTEPSEGSAPGTSTEPSEGSAPGTSESATPESGPGSEPATSGSETPGSEPATSGSETPGSPAGSPTSTEEGTSESATPESGPGTSTEPSEGSAPGASSAPCNIQMEDPTFKENYRFHAINGYIMDTLPGLVMAQDQRIRWYLLSMGSNENIHSIHFSGHVFTVRKKEEYKMALYNLYPGVFETVEMLPSKAGIWRVECLIGEHLHAGMSTLFLVYSNKCQTPLGMASGHIRDFQITASGQYGQWAPKLARLHYSGSINAWSTKEPFSWIKVDLLAPMIIHGIKTQGARQKFSSLYISQFIIMYSLDGKKWQTYRGNSTGTLMVFFGNVDSSGIKHNIFNPPIIARYIRLHPTHYSIRSTLRMELMGCDLNSCSMPLGMESKAISDAQITASSYFTNMFATWSPSKARLHLQGRSNAWRPQVNNPKEWLQVDFQKTMKVTGVTTQGVKSLLTSMYVKEFLISSSQDGHQWTLFFQNGKVKVFQGNQDSFTPVVNSLDPPLLTRYLRIHPQSWVHQIALRMEVLGCEAQDLYGAPGTSESATPESGPGSEPATSGSETPGTSESATPESGPGSEPATSGSETPGTSESATPESGPGTSTEPSEGSAPGSPAGSPTSTEEGTSESATPESGPGSEPATSGSETPGTSESATPESGPGSPAGSPTSTEEGSPAGSPTSTEEGTSTEPSEGSAPGTSESATPESGPGTSESATPESGPGTSESATPESGPGSEPATSGSETPGSEPATSGSETPGSPAGSPTSTEEGTSTEPSEGSAPGTSTEPSEGSAPGSEPATSGSETPGTSESATPESGPGTSTEPSEGSAPASSEQKLISEEDLSPATGHHHHHH

SEQ ID NO: 1250 - DNA, 6612 bp, synthetic construct
  misc_feature 1..6612: note = Description of Artificial Sequence: Synthetic polynucleotide
  source 1..6612: mol_type = other DNA
gccaccagaagatactacctgggtgcagtggaactgtcatgggactatatgcaaagtgatctcggtgagctgcctgtggacgcaagatttcctcctagagtgccaaaatcttttccattcggcgcgccaggctccagcccctccgcgagcacgggaaccggaccaggttcgtcaccctcagcatcaacggggacgggaccgggggcgtcaccaggaacgtcctccaccggctcgccgggtgcatcacccggaacgtcatcgaccggatcgccagggagctcgacgccatcaggcgcaacaggatcacctggctcaagccctagcgcgtcaaccggcacgggtccgggtgcctcccctggcacgtccagcaccggatcacccggatcgagcccatccgcctcaaccggaaccggacccggtacaccagggtcgggaacagcctcctcgtcaccaggctcctcaaccccctcgggagccacgggttcgcccggttcgtcaacgccttccggagcaactggtagccccggagcatcgccaggaacttcgagcacggggtcgcccgcctcgagcaacacctcagtcgtgtacaaaaagactctgtttgtagaattcacggatcaccttttcaacatcgctaagccaaggccaccctggatgggtctgctaggtcctaccatccaggctgaggtttatgatacagtggtcattacacttaagaacatggcttcccatcctgtcagtcttcatgctgttggtgtatcctactggaaagcttctgagggagctgaatatgatgatcagaccagtcaaagggagaaagaagatgataaagtcttccctggtggaagccatacatatgtctggcaggtcctgaaagagaatggtccaatggcctctgacccactgtgccttacctactcatatctttctcatgtggacctggtaaaagacttgaattcaggcctcattggagccctactagtatgtagagaagggagtctggccaaggaaaagacacagaccttgcacaaatttatactactttttgctgtatttgatgaagggaaaagttggcactcagaaacaaagaactccttgatgcaggatagggatgctgcatctgctcgggcctggcctaaaatgcacacagtcaatggttatgtaaacaggtctctgccaggtctgattggatgccacaggaaatcagtctattggcatgtgattggaatgggcaccactcctgaagtgcactcaatattcctcgaaggtcacacatttcttgtgaggaaccatcgccaggctagcttggaaatctcgccaataactttccttactgctcaaacactcttgatggaccttggacagtttctactgttttgtcatatctcttcccaccaacatgatggcatggaagcttatgtcaaagtagacagctgtccagaggaaccccaactacgaatgaaaaataatgaagaagcggaagactatgatgatgatcttactgattctgaaatggatgtggtcaggtttgatgatgacaactctccttcctttatccaaattcgctcagttgccaagaagcatcctaaaacttgggtacattacattgctgctgaagaggaggactgggactatgctcccttagtcctcgcccccgatgacagaagttataaaagtcaatatttgaacaatggccctcagcggattggtaggaagtacaaaaaagtccgatttatggcatacacagatgaaacctttaagactcgtgaagctattcagcatgaatcaggaatcttgggacctttactttatggggaagttggagacacactgttgattatatttaagaatcaagcaagcagaccatataacatctaccctcacggaatcactgatgtccgtcctttgtattcaaggagattaccaaaaggtgtaaaacatttgaaggattttccaattctgccaggagaaatattcaaatataaatggacagtgactgtagaagatgggccaactaaatcagatcctcggtgcctgacccgctattactctagtttcgttaatatggagagagatctagcttcaggactcattggccctctcctcatctgctacaaagaatctgtagatcaaagaggaaaccagataatgtcagacaagaggaatgtcatcctgttttctgtatttgatgagaaccgaagctggtacctcacagagaatatacaacgctttctccccaatccagctggagtgcagcttgaggatccagagttccaagcctccaacatcatgcacagcatcaatggctatgtttttgatagtttgcagttgtcagtttgtttgcatgaggtggcatactggtacattctaagcattggagcacagactgacttcctttctgtcttcttctctggatataccttcaaacacaaaatggtctatgaagacacactcaccctattcccattctcaggagaaactgtcttcatgtcgatggaaaacccaggtctatggattctggggtgccacaactcagactttcggaacagaggcatgaccgccttactgaaggtttctagttgtgacaagaacactggtgattattacgaggacagttatgaagatatttcagcatacttgctgagtaaaaacaatgccattgaaccaagaagcttctctcaaaacggcgcgccaagtcccgctggaagcccaactagcaccgaagaggggacctcagagtccgccacccccgagtccggccctggctctgagcctgccactagcggctccgagactcctggcacatccgaaagcgctacacccgagagtggacccggcacctctaccgagcccagtgagggctccgcccctggaacaagcaccgagcccagcgaaggcagcgccccagggacctccacagagcccagtgaaggcagtgctcctggcaccagcaccgaaccaagcgagggctctgcacccgggacctccaccgagccaagcgaaggctctgcccctggcacttccaccgagcccagcgaaggcagcgcccctgggagccccgctggctctcccaccagcactgaggagggcacatctaccgaaccaagtgaaggctctgcaccaggtgcctcgagcccaccagtcttgaaacgccatcaagctgaaataactcgtactactcttcagtcagatcaagaggaaatcgattatgatgataccatatcagttgaaatgaagaaggaagattttgacatttatgatgaggatgaaaatcagagcccccgcagctttcaaaagaaaacacgacactattttattgctgcagtggagaggctctgggattatgggatgagtagctccccacatgttctaagaaacagggctcagagtggcagtgtccctcagttcaagaaagttgttttccaggaatttactgatggctcctttactcagcccttataccgtggagaactaaatgaacatttgggactcctggggccatatataagagcagaagttgaagataatatcatggtaactttcagaaatcaggcctctcgtccctattccttctattctagccttatttcttatgaggaagatcagaggcaaggagcagaacctagaaaaaactttgtcaagcctaatgaaaccaaaacttacttttggaaagtgcaacatcatatggcacccactaaagatgagtttgactgcaaagcctgggcttatttctctgatgttgacctggaaaaagatgtgcactcaggcctgattggaccccttctggtctgccacactaacacactgaaccctgctcatgggagacaagtgacagtacaggaatttgctctgtttttcaccatctttgatgagaccaaaagctggtacttcactgaaaatatggaaagaaactgcaggggcgcgccatctccagccgggtccccaacttcgaccgaggaagggacctccgagtcagctaccccggagtccggtcctggcacctccaccgaaccatcggagggcagcgcccctgggagccctgccgggagccctacaagcaccgaagagggcaccagtacagagccaagtgaggggagcgcccctggtactagtactgaaccatccgaggggtcagctccaggcacgagtgagtccgctacccccgagagcggaccgggctcagagcccgccacgagtggcagtgaaactccaggctcagaacccgccactagtgggtcagagactccaggcagccctgccggatcccctacgtccaccgaggagggaacatctgagtccgcaacacccgaatccggtccaggcacctccacggaacctagtgaaggctcggcaccaggtgcctcgagcgctccctgcaatatccagatggaagatcccacttttaaagagaattatcgcttccatgcaatcaatggctacataatggatacactacctggcttagtaatggctcaggatcaaaggattcgatggtatctgctcagcatgggcagcaatgaaaacatccattctattcatttcagtggacatgtgttcactgtacgaaaaaaagaggagtataaaatggcactgtacaatctctatccaggtgtttttgagacagtggaaatgttaccatccaaagctggaatttggcgggtggaatgccttattggcgagcatctacatgctgggatgagcacactttttctggtgtacagcaataagtgtcagactcccctgggaatggcttctggacacattagagattttcagattacagcttcaggacaatatggacagtgggccccaaagctggccagacttcattattccggatcaatcaatgcctggagcaccaaggagcccttttcttggatcaaggtggatctgttggcaccaatgattattcacggcatcaagacccagggtgcccgtcagaagttctccagcctctacatctctcagtttatcatcatgtatagtcttgatgggaagaagtggcagacttatcgaggaaattccactggaaccttaatggtcttctttggcaatgtggattcatctgggataaaacacaatatttttaaccctccaattattgctcgatacatccgtttgcacccaactcattatagcattcgcagcactcttcgcatggagttgatgggctgtgatttaaatagttgcagcatgccattgggaatggagagtaaagcaatatcagatgcacagattactgcttcatcctactttaccaatatgtttgccacctggtctccttcaaaagctcgacttcacctccaagggaggagtaatgcctggagacctcaggtgaataatccaaaagagtggctgcaagtggacttccagaagacaatgaaagtcacaggagtaactactcagggagtaaaatctctgcttaccagcatgtatgtgaaggagttcctcatctccagcagtcaagatggccatcagtggactctcttttttcagaatggcaaagtaaaggtttttcagggaaatcaagactccttcacacctgtggtgaactctctagacccaccgttactgactcgctaccttcgaattcacccccagagttgggtgcaccagattgccctgaggatggaggttctgggctgcgaggcacaggacctctacggcgcgccaggtacctcagagtctgctacccccgagtcagggccaggatcagagccagccacctccgggtctgagacacccgggacttccgagagtgccacccctgagtccggacccgggtccgagcccgccacttccggctccgaaactcccggcacaagcgagagcgctaccccagagtcaggaccaggaacatctacagagccctctgaaggctccgctccagggtccccagccggcagtcccactagcaccgaggagggaacctctgaaagcgccacacccgaatcagggccagggtctgagcctgctaccagcggcagcgagacaccaggcacctctgagtccgccacaccagagtccggacccggatctcccgctgggagccccacctccactgaggagggatctcctgctggctctccaacatctactgaggaaggtacctcaaccgagccatccgagggatcagctcccggcacctcagagtcggcaaccccggagtctggacccggaacttccgaaagtgccacaccagagtccggtcccgggacttcagaatcagcaacacccgagtccggccctgggtctgaacccgccacaagtggtagtgagacaccaggatcagaacctgctacctcagggtcagagacacccggatctccggcaggctcaccaacctccactgaggagggcaccagcacagaaccaagcgagggctccgcacccggaacaagcactgaacccagtgagggttcagcacccggctctgagccggccacaagtggcagtgagacacccggcacttcagagagtgccacccccgagagtggcccaggcactagtaccgagccctctgaaggcagtgcgccagcctcgagcgaacaaaaactcatctcagaagaggatctgtcacctgcaaccggtcatcatcaccatcaccattga

SEQ ID NO: 1251 - protein, 2203 aa, synthetic construct
  REGION 1..2203: note = Description of Artificial Sequence: Synthetic polypeptide
ATRRYYLGAVELSWDYMQSDLGELPVGAPGSSPSASTGTGPGSSPSASTGTGPGASPGTSSTGSPGASPGTSSTGSPGSSTPSGATGSPGSSPSASTGTGPGASPGTSSTGSPGSSPSASTGTGPGTPGSGTASSSPGSSTPSGATGSPGSSTPSGATGSPGASPGTSSTGSPASSDARFPPRVPKSFPFNTSVVYKKTLFVEFTDHLFNIAKPRPPWMGLLGPTIQAEVYDTVVITLKNMASHPVSLHAVGVSYWKASEGAEYDDQTSQREKEDDKVFPGGSHTYVWQVLKENGPMASDPLCLTYSYLSHVDLVKDLNSGLIGALLVCREGSLAKEKTQTLHKFILLFAVFDEGKSWHSETKNSLMQDRDAASARAWPKMHTVNGYVNRSLPGLIGCHRKSVYWHVIGMGTTPEVHSIFLEGHTFLVRNHRQASLEISPITFLTAQTLLMDLGQFLLFCHISSHQHDGMEAYVKVDSCPEEPQLRMKNNEEAEDYDDDLTDSEMDVVRFDDDNSPSFIQIRSVAKKHPKTWVHYIAAEEEDWDYAPLVLAPDDRSYKSQYLNNGPQRIGRKYKKVRFMAYTDETFKTREAIQHESGILGPLLYGEVGDTLLIIFKNQASRPYNIYPHGITDVRPLYSRRLPKGVKHLKDFPILPGEIFKYKWTVTVEDGPTKSDPRCLTRYYSSFVNMERDLASGLIGPLLICYKESVDQRGNQIMSDKRNVILFSVFDENRSWYLTENIQRFLPNPAGVQLEDPEFQASNIMHSINGYVFDSLQLSVCLHEVAYWYILSIGAQTDFLSVFFSGYTFKHKMVYEDTLTLFPFSGETVFMSMENPGLWILGCHNSDFRNRGMTALLKVSSCDKNTGDYYEDSYEDISAYLLSKNNAIEPRSFSQNGAPSPAGSPTSTEEGTSESATPESGPGSEPATSGSETPGTSESATPESGPGTSTEPSEGSAPGTSTEPSEGSAPGTSTEPSEGSAPGTSTEPSEGSAPGTSTEPSEGSAPGTSTEPSEGSAPGSPAGSPTSTEEGTSTEPSEGSAPGASSPPVLKRHQAEITRTTLQSDQEEIDYDDTISVEMKKEDFDIYDEDENQSPRSFQKKTRHYFIAAVERLWDYGMSSSPHVLRNRAQSGSVPQFKKVVFQEFTDGSFTQPLYRGELNEHLGLLGPYIRAEVEDNIMVTFRNQASRPYSFYSSLISYEEDQRQGAEPRKNFVKPNETKTYFWKVQHHMAPTKDEFDCKAWAYFSDVDLEKDVHSGLIGPLLVCHTNTLNPAHGRQVTVQEFALFFTIFDETKSWYFTENMERNCRGAPSPAGSPTSTEEGTSESATPESGPGTSTEPSEGSAPGSPAGSPTSTEEGTSTEPSEGSAPGTSTEPSEGSAPGTSESATPESGPGSEPATSGSETPGSEPATSGSETPGSPAGSPTSTEEGTSESATPESGPGTSTEPSEGSAPGASSAPCNIQMEDPTFKENYRFHAINGYIMDTLPGLVMAQDQRIRWYLLSMGSNENIHSIHFSGHVFTVRKKEEYKMALYNLYPGVFETVEMLPSKAGIWRVECLIGEHLHAGMSTLFLVYSNKCQTPLGMASGHIRDFQITASGQYGQWAPKLARLHYSGSINAWSTKEPFSWIKVDLLAPMIIHGIKTQGARQKFSSLYISQFIIMYSLDGKKWQTYRGNSTGTLMVFFGNVDSSGIKHNIFNPPIIARYIRLHPTHYSIRSTLRMELMGCDLNSCSMPLGMESKAISDAQITASSYFTNMFATWSPSKARLHLQGRSNAWRPQVNNPKEWLQVDFQKTMKVTGVTTQGVKSLLTSMYVKEFLISSSQDGHQWTLFFQNGKVKVFQGNQDSFTPVVNSLDPPLLTRYLRIHPQSWVHQIALRMEVLGCEAQDLYGAPGTSESATPESGPGSEPATSGSETPGTSESATPESGPGSEPATSGSETPGTSESATPESGPGTSTEPSEGSAPGSPAGSPTSTEEGTSESATPESGPGSEPATSGSETPGTSESATPESGPGSPAGSPTSTEEGSPAGSPTSTEEGTSTEPSEGSAPGTSESATPESGPGTSESATPESGPGTSESATPESGPGSEPATSGSETPGSEPATSGSETPGSPAGSPTSTEEGTSTEPSEGSAPGTSTEPSEGSAPGSEPATSGSETPGTSESATPESGPGTSTEPSEGSAPASSEQKLISEEDLSPATGHHHHHH

SEQ ID NO: 1252 - DNA, 6612 bp, synthetic construct
  misc_feature 1..6612: note = Description of Artificial Sequence: Synthetic polynucleotide
  source 1..6612: mol_type = other DNA
gccaccagaagatactacctgggtgcagtggaactgtcatgggactatatgcaaagtgatctcggtgagctgcctgtgggcgcgccaggctccagcccctccgcgagcacgggaaccggaccaggttcgtcaccctcagcatcaacggggacgggaccgggggcgtcaccaggaacgtcctccaccggctcgccgggtgcatcacccggaacgtcatcgaccggatcgccagggagctcgacgccatcaggcgcaacaggatcacctggctcaagccctagcgcgtcaaccggcacgggtccgggtgcctcccctggcacgtccagcaccggatcacccggatcgagcccatccgcctcaaccggaaccggacccggtacaccagggtcgggaacagcctcctcgtcaccaggctcctcaaccccctcgggagccacgggttcgcccggttcgtcaacgccttccggagcaactggtagccccggagcatcgccaggaacttcgagcacggggtcgcccgcctcgagcgacgcaagatttcctcctagagtgccaaaatcttttccattcaacacctcagtcgtgtacaaaaagactctgtttgtagaattcacggatcaccttttcaacatcgctaagccaaggccaccctggatgggtctgctaggtcctaccatccaggctgaggtttatgatacagtggtcattacacttaagaacatggcttcccatcctgtcagtcttcatgctgttggtgtatcctactggaaagcttctgagggagctgaatatgatgatcagaccagtcaaagggagaaagaagatgataaagtcttccctggtggaagccatacatatgtctggcaggtcctgaaagagaatggtccaatggcctctgacccactgtgccttacctactcatatctttctcatgtggacctggtaaaagacttgaattcaggcctcattggagccctactagtatgtagagaagggagtctggccaaggaaaagacacagaccttgcacaaatttatactactttttgctgtatttgatgaagggaaaagttggcactcagaaacaaagaactccttgatgcaggatagggatgctgcatctgctcgggcctggcctaaaatgcacacagtcaatggttatgtaaacaggtctctgccaggtctgattggatgccacaggaaatcagtctattggcatgtgattggaatgggcaccactcctgaagtgcactcaatattcctcgaaggtcacacatttcttgtgaggaaccatcgccaggctagcttggaaatctcgccaataactttccttactgctcaaacactcttgatggaccttggacagtttctactgttttgtcatatctcttcccaccaacatgatggcatggaagcttatgtcaaagtagacagctgtccagaggaaccccaactacgaatgaaaaataatgaagaagcggaagactatgatgatgatcttactgattctgaaatggatgtggtcaggtttgatgatgacaactctccttcctttatccaaattcgctcagttgccaagaagcatcctaaaacttgggtacattacattgctgctgaagaggaggactgggactatgctcccttagtcctcgcccccgatgacagaagttataaaagtcaatatttgaacaatggccctcagcggattggtaggaagtacaaaaaagtccgatttatggcatacacagatgaaacctttaagactcgtgaagctattcagcatgaatcaggaatcttgggacctttactttatggggaagttggagacacactgttgattatatttaagaatcaagcaagcagaccatataacatctaccctcacggaatcactgatgtccgtcctttgtattcaaggagattaccaaaaggtgtaaaacatttgaaggattttccaattctgccaggagaaatattcaaatataaatggacagtgactgtagaagatgggccaactaaatcagatcctcggtgcctgacccgctattactctagtttcgttaatatggagagagatctagcttcaggactcattggccctctcctcatctgctacaaagaatctgtagatcaaagaggaaaccagataatgtcagacaagaggaatgtcatcctgttttctgtatttgatgagaaccgaagctggtacctcacagagaatatacaacgctttctccccaatccagctggagtgcagcttgaggatccagagttccaagcctccaacatcatgcacagcatcaatggctatgtttttgatagtttgcagttgtcagtttgtttgcatgaggtggcatactggtacattctaagcattggagcacagactgacttcctttctgtcttcttctctggatataccttcaaacacaaaatggtctatgaagacacactcaccctattcccattctcaggagaaactgtcttcatgtcgatggaaaacccaggtctatggattctggggtgccacaactcagactttcggaacagaggcatgaccgccttactgaaggtttctagttgtgacaagaacactggtgattattacgaggacagttatgaagatatttcagcatacttgctgagtaaaaacaatgccattgaaccaagaagcttctctcaaaacggcgcgccaagtcccgctggaagcccaactagcaccgaagaggggacctcagagtccgccacccccgagtccggccctggctctgagcctgccactagcggctccgagactcctggcacatccgaaagcgctacacccgagagtggacccggcacctctaccgagcccagtgagggctccgcccctggaacaagcaccgagcccagcgaaggcagcgccccagggacctccacagagcccagtgaaggcagtgctcctggcaccagcaccgaaccaagcgagggctctgcacccgggacctccaccgagccaagcgaaggctctgcccctggcacttccaccgagcccagcgaaggcagcgcccctgggagccccgctggctctcccaccagcactgaggagggcacatctaccgaaccaagtgaaggctctgcaccaggtgcctcgagcccaccagtcttgaaacgccatcaagctgaaataactcgtactactcttcagtcagatcaagaggaaatcgattatgatgataccatatcagttgaaatgaagaaggaagattttgacatttatgatgaggatgaaaatcagagcccccgcagctttcaaaagaaaacacgacactattttattgctgcagtggagaggctctgggattatgggatgagtagctccccacatgttctaagaaacagggctcagagtggcagtgtccctcagttcaagaaagttgttttccaggaatttactgatggctcctttactcagcccttataccgtggagaactaaatgaacatttgggactcctggggccatatataagagcagaagttgaagataatatcatggtaactttcagaaatcaggcctctcgtccctattccttctattctagccttatttcttatgaggaagatcagaggcaaggagcagaacctagaaaaaactttgtcaagcctaatgaaaccaaaacttacttttggaaagtgcaacatcatatggcacccactaaagatgagtttgactgcaaagcctgggcttatttctctgatgttgacctggaaaaagatgtgcactcaggcctgattggaccccttctggtctgccacactaacacactgaaccctgctcatgggagacaagtgacagtacaggaatttgctctgtttttcaccatctttgatgagaccaaaagctggtacttcactgaaaatatggaaagaaactgcaggggcgcgccatctccagccgggtccccaacttcgaccgaggaagggacctccgagtcagctaccccggagtccggtcctggcacctccaccgaaccatcggagggcagcgcccctgggagccctgccgggagccctacaagcaccgaagagggcaccagtacagagccaagtgaggggagcgcccctggtactagtactgaaccatccgaggggtcagctccaggcacgagtgagtccgctacccccgagagcggaccgggctcagagcccgccacgagtggcagtgaaactccaggctcagaacccgccactagtgggtcagagactccaggcagccctgccggatcccctacgtccaccgaggagggaacatctgagtccgcaacacccgaatccggtccaggcacctccacggaacctagtgaaggctcggcaccaggtgcctcgagcgctccctgcaatatccagatggaagatcccacttttaaagagaattatcgcttccatgcaatcaatggctacataatggatacactacctggcttagtaatggctcaggatcaaaggattcgatggtatctgctcagcatgggcagcaatgaaaacatccattctattcatttcagtggacatgtgttcactgtacgaaaaaaagaggagtataaaatggcactgtacaatctctatccaggtgtttttgagacagtggaaatgttaccatccaaagctggaatttggcgggtggaatgccttattggcgagcatctacatgctgggatgagcacactttttctggtgtacagcaataagtgtcagactcccctgggaatggcttctggacacattagagattttcagattacagcttcaggacaatatggacagtgggccccaaagctggccagacttcattattccggatcaatcaatgcctggagcaccaaggagcccttttcttggatcaaggtggatctgttggcaccaatgattattcacggcatcaagacccagggtgcccgtcagaagttctccagcctctacatctctcagtttatcatcatgtatagtcttgatgggaagaagtggcagacttatcgaggaaattccactggaaccttaatggtcttctttggcaatgtggattcatctgggataaaacacaatatttttaaccctccaattattgctcgatacatccgtttgcacccaactcattatagcattcgcagcactcttcgcatggagttgatgggctgtgatttaaatagttgcagcatgccattgggaatggagagtaaagcaatatcagatgcacagattactgcttcatcctactttaccaatatgtttgccacctggtctccttcaaaagctcgacttcacctccaagggaggagtaatgcctggagacctcaggtgaataatccaaaagagtggctgcaagtggacttccagaagacaatgaaagtcacaggagtaactactcagggagtaaaatctctgcttaccagcatgtatgtgaaggagttcctcatctccagcagtcaagatggccatcagtggactctcttttttcagaatggcaaagtaaaggtttttcagggaaatcaagactccttcacacctgtggtgaactctctagacccaccgttactgactcgctaccttcgaattcacccccagagttgggtgcaccagattgccctgaggatggaggttctgggctgcgaggcacaggacctctacggcgcgccaggtacctcagagtctgctacccccgagtcagggccaggatcagagccagccacctccgggtctgagacacccgggacttccgagagtgccacccctgagtccggacccgggtccgagcccgccacttccggctccgaaactcccggcacaagcgagagcgctaccccagagtcaggaccaggaacatctacagagccctctgaaggctccgctccagggtccccagccggcagtcccactagcaccgaggagggaacctctgaaagcgccacacccgaatcagggccagggtctgagcctgctaccagcggcagcgagacaccaggcacctctgagtccgccacaccagagtccggacccggatctcccgctgggagccccacctccactgaggagggatctcctgctggctctccaacatctactgaggaaggtacctcaaccgagccatccgagggatcagctcccggcacctcagagtcggcaaccccggagtctggacccggaacttccgaaagtgccacaccagagtccggtcccgggacttcagaatcagcaacacccgagtccggccctgggtctgaacccgccacaagtggtagtgagacaccaggatcagaacctgctacctcagggtcagagacacccggatctccggcaggctcaccaacctccactgaggagggcaccagcacagaaccaagcgagggctccgcacccggaacaagcactgaacccagtgagggttcagcacccggctctgagccggccacaagtggcagtgagacacccggcacttcagagagtgccacccccgagagtggcccaggcactagtaccgagccctctgaaggcagtgcgccagcctcgagcgaacaaaaactcatctcagaagaggatctgtcacctgcaaccggtcatcatcaccatcaccattga

SEQ ID NO: 1253 - protein, 2203 aa, synthetic construct
  REGION 1..2203: note = Description of Artificial Sequence: Synthetic polypeptide
ATRRYYLGAVELSWDYMQGAPTSESATPESGPGSEPATSGSETPGTSESATPESGPGSEPATSGSETPGTSESATPESGPGTSTEPSEGSAPGSPAGSPTSTEEGTSESATPESGPGSEPATSGSETPGTSESATPESGPGSPAGSPTSTEEGSPAGSPTSTEEGASSSDLGELPVDARFPPRVPKSFPFNTSVVYKKTLFVEFTDHLFNIAKPRPPWMGLLGPTIQAEVYDTVVITLKNMASHPVSLHAVGVSYWKASEGAEYDDQTSQREKEDDKVFPGGSHTYVWQVLKENGPMASDPLCLTYSYLSHVDLVKDLNSGLIGALLVCREGSLAKEKTQTLHKFILLFAVFDEGKSWHSETKNSLMQDRDAASARAWPKMHTVNGYVNRSLPGLIGCHRKSVYWHVIGMGTTPEVHSIFLEGHTFLVRNHRQASLEISPITFLTAQTLLMDLGQFLLFCHISSHQHDGMEAYVKVDSCPEEPQLRMKNNEEAEDYDDDLTDSEMDVVRFDDDNSPSFIQIRSVAKKHPKTWVHYIAAEEEDWDYAPLVLAPDDRSYKSQYLNNGPQRIGRKYKKVRFMAYTDETFKTREAIQHESGILGPLLYGEVGDTLLIIFKNQASRPYNIYPHGITDVRPLYSRRLPKGVKHLKDFPILPGEIFKYKWTVTVEDGPTKSDPRCLTRYYSSFVNMERDLASGLIGPLLICYKESVDQRGNQIMSDKRNVILFSVFDENRSWYLTENIQRFLPNPAGVQLEDPEFQASNIMHSINGYVFDSLQLSVCLHEVAYWYILSIGAQTDFLSVFFSGYTFKHKMVYEDTLTLFPFSGETVFMSMENPGLWILGCHNSDFRNRGMTALLKVSSCDKNTGDYYEDSYEDISAYLLSKNNAIEPRSFSQNGAPSPAGSPTSTEEGTSESATPESGPGSEPATSGSETPGTSESATPESGPGTSTEPSEGSAPGTSTEPSEGSAPGTSTEPSEGSAPGTSTEPSEGSAPGTSTEPSEGSAPGTSTEPSEGSAPGSPAGSPTSTEEGTSTEPSEGSAPGASSPPVLKRHQAEITRTTLQSDQEEIDYDDTISVEMKKEDFDIYDEDENQSPRSFQKKTRHYFIAAVERLWDYGMSSSPHVLRNRAQSGSVPQFKKVVFQEFTDGSFTQPLYRGELNEHLGLLGPYIRAEVEDNIMVTFRNQASRPYSFYSSLISYEEDQRQGAEPRKNFVKPNETKTYFWKVQHHMAPTKDEFDCKAWAYFSDVDLEKDVHSGLIGPLLVCHTNTLNPAHGRQVTVQEFALFFTIFDETKSWYFTENMERNCRGAPGTPGSGTASSSPGASPGTSSTGSPGASPGTSSTGSPGASPGTSSTGSPGSSPSASTGTGPGTPGSGTASSSPGASPGTSSTGSPGASPGTSSTGSPGASPGTSSTGSPGSSTPSGATGSPGSSTPSGATGSPGASPGTSSTGSPASSAPCNIQMEDPTFKENYRFHAINGYIMDTLPGLVMAQDQRIRWYLLSMGSNENIHSIHFSGHVFTVRKKEEYKMALYNLYPGVFETVEMLPSKAGIWRVECLIGEHLHAGMSTLFLVYSNKCQTPLGMASGHIRDFQITASGQYGQWAPKLARLHYSGSINAWSTKEPFSWIKVDLLAPMIIHGIKTQGARQKFSSLYISQFIIMYSLDGKKWQTYRGNSTGTLMVFFGNVDSSGIKHNIFNPPIIARYIRLHPTHYSIRSTLRMELMGCDLNSCSMPLGMESKAISDAQITASSYFTNMFATWSPSKARLHLQGRSNAWRPQVNNPKEWLQVDFQKTMKVTGVTTQGVKSLLTSMYVKEFLISSSQDGHQWTLFFQNGKVKVFQGNQDSFTPVVNSLDPPLLTRYLRIHPQSWVHQIALRMEVLGCEAQDLYGAPGTSESATPESGPGSEPATSGSETPGTSESATPESGPGSEPATSGSETPGTSESATPESGPGTSTEPSEGSAPGSPAGSPTSTEEGTSESATPESGPGSEPATSGSETPGTSESATPESGPGSPAGSPTSTEEGSPAGSPTSTEEGTSTEPSEGSAPGTSESATPESGPGTSESATPESGPGTSESATPESGPGSEPATSGSETPGSEPATSGSETPGSPAGSPTSTEEGTSTEPSEGSAPGTSTEPSEGSAPGSEPATSGSETPGTSESATPESGPGTSTEPSEGSAPASSEQKLISEEDLSPATGHHHHHH

SEQ ID NO: 1254 - DNA, 6612 bp, synthetic construct
  misc_feature 1..6612: note = Description of Artificial Sequence: Synthetic polynucleotide
  source 1..6612: mol_type = other DNA
gccaccagaagatactacctgggtgcagtggaactgtcatgggactatatgcaaggcgcgccaacatcagagagcgccacccctgaaagtggtcccgggagcgagccagccacatctgggtcggaaacgccaggcacaagtgagtctgcaactcccgagtccggacctggctccgagcctgccactagcggctccgagactccgggaacttccgagagcgctacaccagaaagcggacccggaaccagtaccgaacctagcgagggctctgctccgggcagcccagccggctctcctacatccacggaggagggcacttccgaatccgccaccccggagtcagggccaggatctgaacccgctacctcaggcagtgagacgccaggaacgagcgagtccgctacaccggagagtgggccagggagccctgctggatctcctacgtccactgaggaagggtcaccagcgggctcgcccaccagcactgaagaaggtgcctcgagcagtgatctcggtgagctgcctgtggacgcaagatttcctcctagagtgccaaaatcttttccattcaacacctcagtcgtgtacaaaaagactctgtttgtagaattcacggatcaccttttcaacatcgctaagccaaggccaccctggatgggtctgctaggtcctaccatccaggctgaggtttatgatacagtggtcattacacttaagaacatggcttcccatcctgtcagtcttcatgctgttggtgtatcctactggaaagcttctgagggagctgaatatgatgatcagaccagtcaaagggagaaagaagatgataaagtcttccctggtggaagccatacatatgtctggcaggtcctgaaagagaatggtccaatggcctctgacccactgtgccttacctactcatatctttctcatgtggacctggtaaaagacttgaattcaggcctcattggagccctactagtatgtagagaagggagtctggccaaggaaaagacacagaccttgcacaaatttatactactttttgctgtatttgatgaagggaaaagttggcactcagaaacaaagaactccttgatgcaggatagggatgctgcatctgctcgggcctggcctaaaatgcacacagtcaatggttatgtaaacaggtctctgccaggtctgattggatgccacaggaaatcagtctattggcatgtgattggaatgggcaccactcctgaagtgcactcaatattcctcgaaggtcacacatttcttgtgaggaaccatcgccaggctagcttggaaatctcgccaataactttccttactgctcaaacactcttgatggaccttggacagtttctactgttttgtcatatctcttcccaccaacatgatggcatggaagcttatgtcaaagtagacagctgtccagaggaaccccaactacgaatgaaaaataatgaagaagcggaagactatgatgatgatcttactgattctgaaatggatgtggtcaggtttgatgatgacaactctccttcctttatccaaattcgctcagttgccaagaagcatcctaaaacttgggtacattacattgctgctgaagaggaggactgggactatgctcccttagtcctcgcccccgatgacagaagttataaaagtcaatatttgaacaatggccctcagcggattggtaggaagtacaaaaaagtccgatttatggcatacacagatgaaacctttaagactcgtgaagctattcagcatgaatcaggaatcttgggacctttactttatggggaagttggagacacactgttgattatatttaagaatcaagcaagcagaccatataacatctaccctcacggaatcactgatgtccgtcctttgtattcaaggagattaccaaaaggtgtaaaacatttgaaggattttccaattctgccaggagaaatattcaaatataaatggacagtgactgtagaagatgggccaactaaatcagatcctcggtgcctgacccgctattactctagtttcgttaatatggagagagatctagcttcaggactcattggccctctcctcatctgctacaaagaatctgtagatcaaagaggaaaccagataatgtcagacaagaggaatgtcatcctgttttctgtatttgatgagaaccgaagctggtacctcacagagaatatacaacgctttctccccaatccagctggagtgcagcttgaggatccagagttccaagcctccaacatcatgcacagcatcaatggctatgtttttgatagtttgcagttgtcagtttgtttgcatgaggtggcatactggtacattctaagcattggagcacagactgacttcctttctgtcttcttctctggatataccttcaaacacaaaatggtctatgaagacacactcaccctattcccattctcaggagaaactgtcttcatgtcgatggaaaacccaggtctatggattctggggtgccacaactcagactttcggaacagaggcatgaccgccttactgaaggtttctagttgtgacaagaacactggtgattattacgaggacagttatgaagatatttcagcatacttgctgagtaaaaacaatgccattgaaccaagaagcttctctcaaaacggcgcgccaagtcccgctggaagcccaactagcaccgaagaggggacctcagagtccgccacccccgagtccggccctggctctgagcctgccactagcggctccgagactcctggcacatccgaaagcgctacacccgagagtggacccggcacctctaccgagcccagtgagggctccgcccctggaacaagcaccgagcccagcgaaggcagcgccccagggacctccacagagcccagtgaaggcagtgctcctggcaccagcaccgaaccaagcgagggctctgcacccgggacctccaccgagccaagcgaaggctctgcccctggcacttccaccgagcccagcgaaggcagcgcccctgggagccccgctggctctcccaccagcactgaggagggcacatctaccgaaccaagtgaaggctctgcaccaggtgcctcgagcccaccagtcttgaaacgccatcaagctgaaataactcgtactactcttcagtcagatcaagaggaaatcgattatgatgataccatatcagttgaaatgaagaaggaagattttgacatttatgatgaggatgaaaatcagagcccccgcagctttcaaaagaaaacacgacactattttattgctgcagtggagaggctctgggattatgggatgagtagctccccacatgttctaagaaacagggctcagagtggcagtgtccctcagttcaagaaagttgttttccaggaatttactgatggctcctttactcagcccttataccgtggagaactaaatgaacatttgggactcctggggccatatataagagcagaagttgaagataatatcatggtaactttcagaaatcaggcctctcgtccctattccttctattctagccttatttcttatgaggaagatcagaggcaaggagcagaacctagaaaaaactttgtcaagcctaatgaaaccaaaacttacttttggaaagtgcaacatcatatggcacccactaaagatgagtttgactgcaaagcctgggcttatttctctgatgttgacctggaaaaagatgtgcactcaggcctgattggaccccttctggtctgccacactaacacactgaaccctgctcatgggagacaagtgacagtacaggaatttgctctgtttttcaccatctttgatgagaccaaaagctggtacttcactgaaaatatggaaagaaactgcaggggcgcgccaggtacacccggatcgggtacagcgtcatcgagccccggtgcgtcacctggtacgtcgagcacggggtcgccaggggcgtcccctgggacgtcctcaacaggctcgcccggtgcgtcacccggcacgtcgtccacgggttcacctggtagctccccttccgcgtccactggcaccgggcctggaactccggggagcggcacagcgagctcgtcgccgggagcatcgcctgggacatcgagcaccgggtcgccaggagcatcgcccggaacatccagcacaggaagccccggcgcgtcgcccgggacatcaagcacaggttccccgggatcgagcacgccgtccggagccactggatcaccagggagctcgacaccttccggcgcaacgggatcgcccggagccagcccgggtacgtcaagcactggctcccctgcctcgagcgctccctgcaatatccagatggaagatcccacttttaaagagaattatcgcttccatgcaatcaatggctacataatggatacactacctggcttagtaatggctcaggatcaaaggattcgatggtatctgctcagcatgggcagcaatgaaaacatccattctattcatttcagtggacatgtgttcactgtacgaaaaaaagaggagtataaaatggcactgtacaatctctatccaggtgtttttgagacagtggaaatgttaccatccaaagctggaatttggcgggtggaatgccttattggcgagcatctacatgctgggatgagcacactttttctggtgtacagcaataagtgtcagactcccctgggaatggcttctggacacattagagattttcagattacagcttcaggacaatatggacagtgggccccaaagctggccagacttcattattccggatcaatcaatgcctggagcaccaaggagcccttttcttggatcaaggtggatctgttggcaccaatgattattcacggcatcaagacccagggtgcccgtcagaagttctccagcctctacatctctcagtttatcatcatgtatagtcttgatgggaagaagtggcagacttatcgaggaaattccactggaaccttaatggtcttctttggcaatgtggattcatctgggataaaacacaatatttttaaccctccaattattgctcgatacatccgtttgcacccaactcattatagcattcgcagcactcttcgcatggagttgatgggctgtgatttaaatagttgcagcatgccattgggaatggagagtaaagcaatatcagatgcacagattactgcttcatcctactttaccaatatgtttgccacctggtctccttcaaaagctcgacttcacctccaagggaggagtaatgcctggagacctcaggtgaataatccaaaagagtggctgcaagtggacttccagaagacaatgaaagtcacaggagtaactactcagggagtaaaatctctgcttaccagcatgtatgtgaaggagttcctcatctccagcagtcaagatggccatcagtggactctcttttttcagaatggcaaagtaaaggtttttcagggaaatcaagactccttcacacctgtggtgaactctctagacccaccgttactgactcgctaccttcgaattcacccccagagttgggtgcaccagattgccctgaggatggaggttctgggctgcgaggcacaggacctctacggcgcgccaggtacctcagagtctgctacccccgagtcagggccaggatcagagccagccacctccgggtctgagacacccgggacttccgagagtgccacccctgagtccggacccgggtccgagcccgccacttccggctccgaaactcccggcacaagcgagagcgctaccccagagtcaggaccaggaacatctacagagccctctgaaggctccgctccagggtccccagccggcagtcccactagcaccgaggagggaacctctgaaagcgccacacccgaatcagggccagggtctgagcctgctaccagcggcagcgagacaccaggcacctctgagtccgccacaccagagtccggacccggatctcccgctgggagccccacctccactgaggagggatctcctgctggctctccaacatctactgaggaaggtacctcaaccgagccatccgagggatcagctcccggcacctcagagtcggcaaccccggagtctggacccggaacttccgaaagtgccacaccagagtccggtcccgggacttcagaatcagcaacacccgagtccggccctgggtctgaacccgccacaagtggtagtgagacaccaggatcagaacctgctacctcagggtcagagacacccggatctccggcaggctcaccaacctccactgaggagggcaccagcacagaaccaagcgagggctccgcacccggaacaagcactgaacccagtgagggttcagcacccggctctgagccggccacaagtggcagtgagacacccggcacttcagagagtgccacccccgagagtggcccaggcactagtaccgagccctctgaaggcagtgcgccagcctcgagcgaacaaaaactcatctcagaagaggatctgtcacctgcaaccggtcatcatcaccatcaccattga

SEQ ID NO: 1255 - protein, 2203 aa, synthetic construct
  REGION 1..2203: note = Description of Artificial Sequence: Synthetic polypeptide
ATRRYYLGAVELSWDYMQGAPGSSPSASTGTGPGSSPSASTGTGPGASPGTSSTGSPGASPGTSSTGSPGSSTPSGATGSPGSSPSASTGTGPGASPGTSSTGSPGSSPSASTGTGPGTPGSGTASSSPGSSTPSGATGSPGSSTPSGATGSPGASPGTSSTGSPASSSDLGELPVDARFPPRVPKSFPFNTSVVYKKTLFVEFTDHLFNIAKPRPPWMGLLGPTIQAEVYDTVVITLKNMASHPVSLHAVGVSYWKASEGAEYDDQTSQREKEDDKVFPGGSHTYVWQVLKENGPMASDPLCLTYSYLSHVDLVKDLNSGLIGALLVCREGSLAKEKTQTLHKFILLFAVFDEGKSWHSETKNSLMQDRDAASARAWPKMHTVNGYVNRSLPGLIGCHRKSVYWHVIGMGTTPEVHSIFLEGHTFLVRNHRQASLEISPITFLTAQTLLMDLGQFLLFCHISSHQHDGMEAYVKVDSCPEEPQLRMKNNEEAEDYDDDLTDSEMDVVRFDDDNSPSFIQIRSVAKKHPKTWVHYIAAEEEDWDYAPLVLAPDDRSYKSQYLNNGPQRIGRKYKKVRFMAYTDETFKTREAIQHESGILGPLLYGEVGDTLLIIFKNQASRPYNIYPHGITDVRPLYSRRLPKGVKHLKDFPILPGEIFKYKWTVTVEDGPTKSDPRCLTRYYSSFVNMERDLASGLIGPLLICYKESVDQRGNQIMSDKRNVILFSVFDENRSWYLTENIQRFLPNPAGVQLEDPEFQASNIMHSINGYVFDSLQLSVCLHEVAYWYILSIGAQTDFLSVFFSGYTFKHKMVYEDTLTLFPFSGETVFMSMENPGLWILGCHNSDFRNRGMTALLKVSSCDKNTGDYYEDSYEDISAYLLSKNNAIEPRSFSQNGAPSPAGSPTSTEEGTSESATPESGPGSEPATSGSETPGTSESATPESGPGTSTEPSEGSAPGTSTEPSEGSAPGTSTEPSEGSAPGTSTEPSEGSAPGTSTEPSEGSAPGTSTEPSEGSAPGSPAGSPTSTEEGTSTEPSEGSAPGASSPPVLKRHQAEITRTTLQSDQEEIDYDDTISVEMKKEDFDIYDEDENQSPRSFQKKTRHYFIAAVERLWDYGMSSSPHVLRNRAQSGSVPQFKKVVFQEFTDGSFTQPLYRGELNEHLGLLGPYIRAEVEDNIMVTFRNQASRPYSFYSSLISYEEDQRQGAEPRKNFVKPNETKTYFWKVQHHMAPTKDEFDCKAWAYFSDVDLEKDVHSGLIGPLLVCHTNTLNPAHGRQVTVQEFALFFTIFDETKSWYFTENMERNCRGAPGTPGSGTASSSPGASPGTSSTGSPGASPGTSSTGSPGASPGTSSTGSPGSSPSASTGTGPGTPGSGTASSSPGASPGTSSTGSPGASPGTSSTGSPGASPGTSSTGSPGSSTPSGATGSPGSSTPSGATGSPGASPGTSSTGSPASSAPCNIQMEDPTFKENYRFHAINGYIMDTLPGLVMAQDQRIRWYLLSMGSNENIHSIHFSGHVFTVRKKEEYKMALYNLYPGVFETVEMLPSKAGIWRVECLIGEHLHAGMSTLFLVYSNKCQTPLGMASGHIRDFQITASGQYGQWAPKLARLHYSGSINAWSTKEPFSWIKVDLLAPMIIHGIKTQGARQKFSSLYISQFIIMYSLDGKKWQTYRGNSTGTLMVFFGNVDSSGIKHNIFNPPIIARYIRLHPTHYSIRSTLRMELMGCDLNSCSMPLGMESKAISDAQITASSYFTNMFATWSPSKARLHLQGRSNAWRPQVNNPKEWLQVDFQKTMKVTGVTTQGVKSLLTSMYVKEFLISSSQDGHQWTLFFQNGKVKVFQGNQDSFTPVVNSLDPPLLTRYLRIHPQSWVHQIALRMEVLGCEAQDLYGAPGTSESATPESGPGSEPATSGSETPGTSESATPESGPGSEPATSGSETPGTSESATPESGPGTSTEPSEGSAPGSPAGSPTSTEEGTSESATPESGPGSEPATSGSETPGTSESATPESGPGSPAGSPTSTEEGSPAGSPTSTEEGTSTEPSEGSAPGTSESATPESGPGTSESATPESGPGTSESATPESGPGSEPATSGSETPGSEPATSGSETPGSPAGSPTSTEEGTSTEPSEGSAPGTSTEPSEGSAPGSEPATSGSETPGTSESATPESGPGTSTEPSEGSAPASSEQKLISEEDLSPATGHHHHHH

SEQ ID NO: 1256 - DNA, 6612 bp, synthetic construct
  misc_feature 1..6612: note = Description of Artificial Sequence: Synthetic polynucleotide
  source 1..6612: mol_type = other DNA
gccaccagaagatactacctgggtgcagtggaactgtcatgggactatatgcaaggcgcgccaggctccagcccctccgcgagcacgggaaccggaccaggttcgtcaccctcagcatcaacggggacgggaccgggggcgtcaccaggaacgtcctccaccggctcgccgggtgcatcacccggaacgtcatcgaccggatcgccagggagctcgacgccatcaggcgcaacaggatcacctggctcaagccctagcgcgtcaaccggcacgggtccgggtgcctcccctggcacgtccagcaccggatcacccggatcgagcccatccgcctcaaccggaaccggacccggtacaccagggtcgggaacagcctcctcgtcaccaggctcctcaaccccctcgggagccacgggttcgcccggttcgtcaacgccttccggagcaactggtagccccggagcatcgccaggaacttcgagcacggggtcgcccgcctcgagcagtgatctcggtgagctgcctgtggacgcaagatttcctcctagagtgccaaaatcttttccattcaacacctcagtcgtgtacaaaaagactctgtttgtagaattcacggatcaccttttcaacatcgctaagccaaggccaccctggatgggtctgctaggtcctaccatccaggctgaggtttatgatacagtggtcattacacttaagaacatggcttcccatcctgtcagtcttcatgctgttggtgtatcctactggaaagcttctgagggagctgaatatgatgatcagaccagtcaaagggagaaagaagatgataaagtcttccctggtggaagccatacatatgtctggcaggtcctgaaagagaatggtccaatggcctctgacccactgtgccttacctactcatatctttctcatgtggacctggtaaaagacttgaattcaggcctcattggagccctactagtatgtagagaagggagtctggccaaggaaaagacacagaccttgcacaaatttatactactttttgctgtatttgatgaagggaaaagttggcactcagaaacaaagaactccttgatgcaggatagggatgctgcatctgctcgggcctggcctaaaatgcacacagtcaatggttatgtaaacaggtctctgccaggtctgattggatgccacaggaaatcagtctattggcatgtgattggaatgggcaccactcctgaagtgcactcaatattcctcgaaggtcacacatttcttgtgaggaaccatcgccaggctagcttggaaatctcgccaataactttccttactgctcaaacactcttgatggaccttggacagtttctactgttttgtcatatctcttcccaccaacatgatggcatggaagcttatgtcaaagtagacagctgtccagaggaaccccaactacgaatgaaaaataatgaagaagcggaagactatgatgatgatcttactgattctgaaatggatgtggtcaggtttgatgatgacaactctccttcctttatccaaattcgctcagttgccaagaagcatcctaaaacttgggtacattacattgctgctgaagaggaggactgggactatgctcccttagtcctcgcccccgatgacagaagttataaaagtcaatatttgaacaatggccctcagcggattggtaggaagtacaaaaaagtccgatttatggcatacacagatgaaacctttaagactcgtgaagctattcagcatgaatcaggaatcttgggacctttactttatggggaagttggagacacactgttgattatatttaagaatcaagcaagcagaccatataacatctaccctcacggaatcactgatgtccgtcctttgtattcaaggagattaccaaaaggtgtaaaacatttgaaggattttccaattctgccaggagaaatattcaaatataaatggacagtgactgtagaagatgggccaactaaatcagatcctcggtgcctgacccgctattactctagtttcgttaatatggagagagatctagcttcaggactcattggccctctcctcatctgctacaaagaatctgtagatcaaagaggaaaccagataatgtcagacaagaggaatgtcatcctgttttctgtatttgatgagaaccgaagctggtacctcacagagaatatacaacgctttctccccaatccagctggagtgcagcttgaggatccagagttccaagcctccaacatcatgcacagcatcaatggctatgtttttgatagtttgcagttgtcagtttgtttgcatgaggtggcatactggtacattctaagcattggagcacagactgacttcctttctgtcttcttctctggatataccttcaaacacaaaatggtctatgaagacacactcaccctattcccattctcaggagaaactgtcttcatgtcgatggaaaacccaggtctatggattctggggtgccacaactcagactttcggaacagaggcatgaccgccttactgaaggtttctagttgtgacaagaacactggtgattattacgaggacagttatgaagatatttcagcatacttgctgagtaaaaacaatgccattgaaccaagaagcttctctcaaaacggcgcgccaagtcccgctggaagcccaactagcaccgaagaggggacctcagagtccgccacccccgagtccggccctggctctgagcctgccactagcggctccgagactcctggcacatccgaaagcgctacacccgagagtggacccggcacctctaccgagcccagtgagggctccgcccctggaacaagcaccgagcccagcgaaggcagcgccccagggacctccacagagcccagtgaaggcagtgctcctggcaccagcaccgaaccaagcgagggctctgcacccgggacctccaccgagccaagcgaaggctctgcccctggcacttccaccgagcccagcgaaggcagcgcccctgggagccccgctggctctcccaccagcactgaggagggcacatctaccgaaccaagtgaaggctctgcaccaggtgcctcgagcccaccagtcttgaaacgccatcaagctgaaataactcgtactactcttcagtcagatcaagaggaaatcgattatgatgataccatatcagttgaaatgaagaaggaagattttgacatttatgatgaggatgaaaatcagagcccccgcagctttcaaaagaaaacacgacactattttattgctgcagtggagaggctctgggattatgggatgagtagctccccacatgttctaagaaacagggctcagagtggcagtgtccctcagttcaagaaagttgttttccaggaatttactgatggctcctttactcagcccttataccgtggagaactaaatgaacatttgggactcctggggccatatataagagcagaagttgaagataatatcatggtaactttcagaaatcaggcctctcgtccctattccttctattctagccttatttcttatgaggaagatcagaggcaaggagcagaacctagaaaaaactttgtcaagcctaatgaaaccaaaacttacttttggaaagtgcaacatcatatggcacccactaaagatgagtttgactgcaaagcctgggcttatttctctgatgttgacctggaaaaagatgtgcactcaggcctgattggaccccttctggtctgccacactaacacactgaaccctgctcatgggagacaagtgacagtacaggaatttgctctgtttttcaccatctttgatgagaccaaaagctggtacttcactgaaaatatggaaagaaactgcaggggcgcgccaggtacacccggatcgggtacagcgtcatcgagccccggtgcgtcacctggtacgtcgagcacggggtcgccaggggcgtcccctgggacgtcctcaacaggctcgcccggtgcgtcacccggcacgtcgtccacgggttcacctggtagctccccttccgcgtccactggcaccgggcctggaactccggggagcggcacagcgagctcgtcgccgggagcatcgcctgggacatcgagcaccgggtcgccaggagcatcgcccggaacatccagcacaggaagccccggcgcgtcgcccgggacatcaagcacaggttccccgggatcgagcacgccgtccggagccactggatcaccagggagctcgacaccttccggcgcaacgggatcgcccggagccagcccgggtacgtcaagcactggctcccctgcctcgagcgctccctgcaatatccagatggaagatcccacttttaaagagaattatcgcttccatgcaatcaatggctacataatggatacactacctggcttagtaatggctcaggatcaaaggattcgatggtatctgctcagcatgggcagcaatgaaaacatccattctattcatttcagtggacatgtgttcactgtacgaaaaaaagaggagtataaaatggcactgtacaatctctatccaggtgtttttgagacagtggaaatgttaccatccaaagctggaatttggcgggtggaatgccttattggcgagcatctacatgctgggatgagcacactttttctggtgtacagcaataagtgtcagactcccctgggaatggcttctggacacattagagattttcagattacagcttcaggacaatatggacagtgggccccaaagctggccagacttcattattccggatcaatcaatgcctggagcaccaaggagcccttttcttggatcaaggtggatctgttggcaccaatgattattcacggcatcaagacccagggtgcccgtcagaagttctccagcctctacatctctcagtttatcatcatgtatagtcttgatgggaagaagtggcagacttatcgaggaaattccactggaaccttaatggtcttctttggcaatgtggattcatctgggataaaacacaatatttttaaccctccaattattgctcgatacatccgtttgcacccaactcattatagcattcgcagcactcttcgcatggagttgatgggctgtgatttaaatagttgcagcatgccattgggaatggagagtaaagcaatatcagatgcacagattactgcttcatcctactttaccaatatgtttgccacctggtctccttcaaaagctcgacttcacctccaagggaggagtaatgcctggagacctcaggtgaataatccaaaagagtggctgcaagtggacttccagaagacaatgaaagtcacaggagtaactactcagggagtaaaatctctgcttaccagcatgtatgtgaaggagttcctcatctccagcagtcaagatggccatcagtggactctcttttttcagaatggcaaagtaaaggtttttcagggaaatcaagactccttcacacctgtggtgaactctctagacccaccgttactgactcgctaccttcgaattcacccccagagttgggtgcaccagattgccctgaggatggaggttctgggctgcgaggcacaggacctctacggcgcgccaggtacctcagagtctgctacccccgagtcagggccaggatcagagccagccacctccgggtctgagacacccgggacttccgagagtgccacccctgagtccggacccgggtccgagcccgccacttccggctccgaaactcccggcacaagcgagagcgctaccccagagtcaggaccaggaacatctacagagccctctgaaggctccgctccagggtccccagccggcagtcccactagcaccgaggagggaacctctgaaagcgccacacccgaatcagggccagggtctgagcctgctaccagcggcagcgagacaccaggcacctctgagtccgccacaccagagtccggacccggatctcccgctgggagccccacctccactgaggagggatctcctgctggctctccaacatctactgaggaaggtacctcaaccgagccatccgagggatcagctcccggcacctcagagtcggcaaccccggagtctggacccggaacttccgaaagtgccacaccagagtccggtcccgggacttcagaatcagcaacacccgagtccggccctgggtctgaacccgccacaagtggtagtgagacaccaggatcagaacctgctacctcagggtcagagacacccggatctccggcaggctcaccaacctccactgaggagggcaccagcacagaaccaagcgagggctccgcacccggaacaagcactgaacccagtgagggttcagcacccggctctgagccggccacaagtggcagtgagacacccggcacttcagagagtgccacccccgagagtggcccaggcactagtaccgagccctctgaaggcagtgcgccagcctcgagcgaacaaaaactcatctcagaagaggatctgtcacctgcaaccggtcatcatcaccatcaccattga

SEQ ID NO: 1257 - protein, 2203 aa, synthetic construct
  REGION 1..2203: note = Description of Artificial Sequence: Synthetic polypeptide
ATRRYYLGAVELSWDYMQSDLGELPVGAPGSSPSASTGTGPGSSPSASTGTGPGASPGTSSTGSPGASPGTSSTGSPGSSTPSGATGSPGSSPSASTGTGPGASPGTSSTGSPGSSPSASTGTGPGTPGSGTASSSPGSSTPSGATGSPGSSTPSGATGSPGASPGTSSTGSPASSDARFPPRVPKSFPFNTSVVYKKTLFVEFTDHLFNIAKPRPPWMGLLGPTIQAEVYDTVVITLKNMASHPVSLHAVGVSYWKASEGAEYDDQTSQREKEDDKVFPGGSHTYVWQVLKENGPMASDPLCLTYSYLSHVDLVKDLNSGLIGALLVCREGSLAKEKTQTLHKFILLFAVFDEGKSWHSETKNSLMQDRDAASARAWPKMHTVNGYVNRSLPGLIGCHRKSVYWHVIGMGTTPEVHSIFLEGHTFLVRNHRQASLEISPITFLTAQTLLMDLGQFLLFCHISSHQHDGMEAYVKVDSCPEEPQLRMKNNEEAEDYDDDLTDSEMDVVRFDDDNSPSFIQIRSVAKKHPKTWVHYIAAEEEDWDYAPLVLAPDDRSYKSQYLNNGPQRIGRKYKKVRFMAYTDETFKTREAIQHESGILGPLLYGEVGDTLLIIFKNQASRPYNIYPHGITDVRPLYSRRLPKGVKHLKDFPILPGEIFKYKWTVTVEDGPTKSDPRCLTRYYSSFVNMERDLASGLIGPLLICYKESVDQRGNQIMSDKRNVILFSVFDENRSWYLTENIQRFLPNPAGVQLEDPEFQASNIMHSINGYVFDSLQLSVCLHEVAYWYILSIGAQTDFLSVFFSGYTFKHKMVYEDTLTLFPFSGETVFMSMENPGLWILGCHNSDFRNRGMTALLKVSSCDKNTGDYYEDSYEDISAYLLSKNNAIEPRSFSQNGAPSPAGSPTSTEEGTSESATPESGPGSEPATSGSETPGTSESATPESGPGTSTEPSEGSAPGTSTEPSEGSAPGTSTEPSEGSAPGTSTEPSEGSAPGTSTEPSEGSAPGTSTEPSEGSAPGSPAGSPTSTEEGTSTEPSEGSAPGASSPPVLKRHQAEITRTTLQSDQEEIDYDDTISVEMKKEDFDIYDEDENQSPRSFQKKTRHYFIAAVERLWDYGMSSSPHVLRNRAQSGSVPQFKKVVFQEFTDGSFTQPLYRGELNEHLGLLGPYIRAEVEDNIMVTFRNQASRPYSFYSSLISYEEDQRQGAEPRKNFVKPNETKTYFWKVQHHMAPTKDEFDCKAWAYFSDVDLEKDVHSGLIGPLLVCHTNTLNPAHGRQVTVQEFALFFTIFDETKSWYFTENMERNCRGAPGTPGSGTASSSPGASPGTSSTGSPGASPGTSSTGSPGASPGTSSTGSPGSSPSASTGTGPGTPGSGTASSSPGASPGTSSTGSPGASPGTSSTGSPGASPGTSSTGSPGSSTPSGATGSPGSSTPSGATGSPGASPGTSSTGSPASSAPCNIQMEDPTFKENYRFHAINGYIMDTLPGLVMAQDQRIRWYLLSMGSNENIHSIHFSGHVFTVRKKEEYKMALYNLYPGVFETVEMLPSKAGIWRVECLIGEHLHAGMSTLFLVYSNKCQTPLGMASGHIRDFQITASGQYGQWAPKLARLHYSGSINAWSTKEPFSWIKVDLLAPMIIHGIKTQGARQKFSSLYISQFIIMYSLDGKKWQTYRGNSTGTLMVFFGNVDSSGIKHNIFNPPIIARYIRLHPTHYSIRSTLRMELMGCDLNSCSMPLGMESKAISDAQITASSYFTNMFATWSPSKARLHLQGRSNAWRPQVNNPKEWLQVDFQKTMKVTGVTTQGVKSLLTSMYVKEFLISSSQDGHQWTLFFQNGKVKVFQGNQDSFTPVVNSLDPPLLTRYLRIHPQSWVHQIALRMEVLGCEAQDLYGAPGTSESATPESGPGSEPATSGSETPGTSESATPESGPGSEPATSGSETPGTSESATPESGPGTSTEPSEGSAPGSPAGSPTSTEEGTSESATPESGPGSEPATSGSETPGTSESATPESGPGSPAGSPTSTEEGSPAGSPTSTEEGTSTEPSEGSAPGTSESATPESGPGTSESATPESGPGTSESATPESGPGSEPATSGSETPGSEPATSGSETPGSPAGSPTSTEEGTSTEPSEGSAPGTSTEPSEGSAPGSEPATSGSETPGTSESATPESGPGTSTEPSEGSAPASSEQKLISEEDLSPATGHHHHHH

SEQ ID NO: 1258 - DNA, 6612 bp, synthetic construct
  misc_feature 1..6612: note = Description of Artificial Sequence: Synthetic polynucleotide
  source 1..6612: mol_type = other DNA
gccaccagaagatactacctgggtgcagtggaactgtcatgggactatatgcaaagtgatctcggtgagctgcctgtgggcgcgccaggctccagcccctccgcgagcacgggaaccggaccaggttcgtcaccctcagcatcaacggggacgggaccgggggcgtcaccaggaacgtcctccaccggctcgccgggtgcatcacccggaacgtcatcgaccggatcgccagggagctcgacgccatcaggcgcaacaggatcacctggctcaagccctagcgcgtcaaccggcacgggtccgggtgcctcccctggcacgtccagcaccggatcacccggatcgagcccatccgcctcaaccggaaccggacccggtacaccagggtcgggaacagcctcctcgtcaccaggctcctcaaccccctcgggagccacgggttcgcccggttcgtcaacgccttccggagcaactggtagccccggagcatcgccaggaacttcgagcacggggtcgcccgcctcgagcgacgcaagatttcctcctagagtgccaaaatcttttccattcaacacctcagtcgtgtacaaaaagactctgtttgtagaattcacggatcaccttttcaacatcgctaagccaaggccaccctggatgggtctgctaggtcctaccatccaggctgaggtttatgatacagtggtcattacacttaagaacatggcttcccatcctgtcagtcttcatgctgttggtgtatcctactggaaagcttctgagggagctgaatatgatgatcagaccagtcaaagggagaaagaagatgataaagtcttccctggtggaagccatacatatgtctggcaggtcctgaaagagaatggtccaatggcctctgacccactgtgccttacctactcatatctttctcatgtggacctggtaaaagacttgaattcaggcctcattggagccctactagtatgtagagaagggagtctggccaaggaaaagacacagaccttgcacaaatttatactactttttgctgtatttgatgaagggaaaagttggcactcagaaacaaagaactccttgatgcaggatagggatgctgcatctgctcgggcctggcctaaaatgcacacagtcaatggttatgtaaacaggtctctgccaggtctgattggatgccacaggaaatcagtctattggcatgtgattggaatgggcaccactcctgaagtgcactcaatattcctcgaaggtcacacatttcttgtgaggaaccatcgccaggctagcttggaaatctcgccaataactttccttactgctcaaacactcttgatggaccttggacagtttctactgttttgtcatatctcttcccaccaacatgatggcatggaagcttatgtcaaagtagacagctgtccagaggaaccccaactacgaatgaaaaataatgaagaagcggaagactatgatgatgatcttactgattctgaaatggatgtggtcaggtttgatgatgacaactctccttcctttatccaaattcgctcagttgccaagaagcatcctaaaacttgggtacattacattgctgctgaagaggaggactgggactatgctcccttagtcctcgcccccgatgacagaagttataaaagtcaatatttgaacaatggccctcagcggattggtaggaagtacaaaaaagtccgatttatggcatacacagatgaaacctttaagactcgtgaagctattcagcatgaatcaggaatcttgggacctttactttatggggaagttggagacacactgttgattatatttaagaatcaagcaagcagaccatataacatctaccctcacggaatcactgatgtccgtcctttgtattcaaggagattaccaaaaggtgtaaaacatttgaaggattttccaattctgccaggagaaatattcaaatataaatggacagtgactgtagaagatgggccaactaaatcagatcctcggtgcctgacccgctattactctagtttcgttaatatggagagagatctagcttcaggactcattggccctctcctcatctgctacaaagaatctgtagatcaaagaggaaaccagataatgtcagacaagaggaatgtcatcctgttttctgtatttgatgagaaccgaagctggtacctcacagagaatatacaacgctttctccccaatccagctggagtgcagcttgaggatccagagttccaagcctccaacatcatgcacagcatcaatggctatgtttttgatagtttgcagttgtcagtttgtttgcatgaggtggcatactggtacattctaagcattggagcacagactgacttcctttctgtcttcttctctggatataccttcaaacacaaaatggtctatgaagacacactcaccctattcccattctcaggagaaactgtcttcatgtcgatggaaaacccaggtctatggattctggggtgccacaactcagactttcggaacagaggcatgaccgccttactgaaggtttctagttgtgacaagaacactggtgattattacgaggacagttatgaagatatttcagcatacttgctgagtaaaaacaatgccattgaaccaagaagcttctctcaaaacggcgcgccaagtcccgctggaagcccaactagcaccgaagaggggacctcagagtccgccacccccgagtccggccctggctctgagcctgccactagcggctccgagactcctggcacatccgaaagcgctacacccgagagtggacccggcacctctaccgagcccagtgagggctccgcccctggaacaagcaccgagcccagcgaaggcagcgccccagggacctccacagagcccagtgaaggcagtgctcctggcaccagcaccgaaccaagcgagggctctgcacccgggacctccaccgagccaagcgaaggctctgcccctggcacttccaccgagcccagcgaaggcagcgcccctgggagccccgctggctctcccaccagcactgaggagggcacatctaccgaaccaagtgaaggctctgcaccaggtgcctcgagcccaccagtcttgaaacgccatcaagctgaaataactcgtactactcttcagtcagatcaagaggaaatcgattatgatgataccatatcagttgaaatgaagaaggaagattttgacatttatgatgaggatgaaaatcagagcccccgcagctttcaaaagaaaacacgacactattttattgctgcagtggagaggctctgggattatgggatgagtagctccccacatgttctaagaaacagggctcagagtggcagtgtccctcagttcaagaaagttgttttccaggaatttactgatggctcctttactcagcccttataccgtggagaactaaatgaacatttgggactcctggggccatatataagagcagaagttgaagataatatcatggtaactttcagaaatcaggcctctcgtccctattccttctattctagccttatttcttatgaggaagatcagaggcaaggagcagaacctagaaaaaactttgtcaagcctaatgaaaccaaaacttacttttggaaagtgcaacatcatatggcacccactaaagatgagtttgactgcaaagcctgggcttatttctctgatgttgacctggaaaaagatgtgcactcaggcctgattggaccccttctggtctgccacactaacacactgaaccctgctcatgggagacaagtgacagtacaggaatttgctctgtttttcaccatctttgatgagaccaaaagctggtacttcactgaaaatatggaaagaaactgcaggggcgcgccaggtacacccggatcgggtacagcgtcatcgagccccggtgcgtcacctggtacgtcgagcacggggtcgccaggggcgtcccctgggacgtcctcaacaggctcgcccggtgcgtcacccggcacgtcgtccacgggttcacctggtagctccccttccgcgtccactggcaccgggcctggaactccggggagcggcacagcgagctcgtcgccgggagcatcgcctgggacatcgagcaccgggtcgccaggagcatcgcccggaacatccagcacaggaagccccggcgcgtcgcccgggacatcaagcacaggttccccgggatcgagcacgccgtccggagccactggatcaccagggagctcgacaccttccggcgcaacgggatcgcccggagccagcccgggtacgtcaagcactggctcccctgcctcgagcgctccctgcaatatccagatggaagatcccacttttaaagagaattatcgcttccatgcaatcaatggctacataatggatacactacctggcttagtaatggctcaggatcaaaggattcgatggtatctgctcagcatgggcagcaatgaaaacatccattctattcatttcagtggacatgtgttcactgtacgaaaaaaagaggagtataaaatggcactgtacaatctctatccaggtgtttttgagacagtggaaatgttaccatccaaagctggaatttggcgggtggaatgccttattggcgagcatctacatgctgggatgagcacactttttctggtgtacagcaataagtgtcagactcccctgggaatggcttctggacacattagagattttcagattacagcttcaggacaatatggacagtgggccccaaagctggccagacttcattattccggatcaatcaatgcctggagcaccaaggagcccttttcttggatcaaggtggatctgttggcaccaatgattattcacggcatcaagacccagggtgcccgtcagaagttctccagcctctacatctctcagtttatcatcatgtatagtcttgatgggaagaagtggcagacttatcgaggaaattccactggaaccttaatggtcttctttggcaatgtggattcatctgggataaaacacaatatttttaaccctccaattattgctcgatacatccgtttgcacccaactcattatagcattcgcagcactcttcgcatggagttgatgggctgtgatttaaatagttgcagcatgccattgggaatggagagtaaagcaatatcagatgcacagattactgcttcatcctactttaccaatatgtttgccacctggtctccttcaaaagctcgacttcacctccaagggaggagtaatgcctggagacctcaggtgaataatccaaaagagtggctgcaagtggacttccagaagacaatgaaagtcacaggagtaactactcagggagtaaaatctctgcttaccagcatgtatgtgaaggagttcctcatctccagcagtcaagatggccatcagtggactctcttttttcagaatggcaaagtaaaggtttttcagggaaatcaagactccttcacacctgtggtgaactctctagacccaccgttactgactcgctaccttcgaattcacccccagagttgggtgcaccagattgccctgaggatggaggttctgggctgcgaggcacaggacctctacggcgcgccaggtacctcagagtctgctacccccgagtcagggccaggatcagagccagccacctccgggtctgagacacccgggacttccgagagtgccacccctgagtccggacccgggtccgagcccgccacttccggctccgaaactcccggcacaagcgagagcgctaccccagagtcaggaccaggaacatctacagagccctctgaaggctccgctccagggtccccagccggcagtcccactagcaccgaggagggaacctctgaaagcgccacacccgaatcagggccagggtctgagcctgctaccagcggcagcgagacaccaggcacctctgagtccgccacaccagagtccggacccggatctcccgctgggagccccacctccactgaggagggatctcctgctggctctccaacatctactgaggaaggtacctcaaccgagccatccgagggatcagctcccggcacctcagagtcggcaaccccggagtctggacccggaacttccgaaagtgccacaccagagtccggtcccgggacttcagaatcagcaacacccgagtccggccctgggtctgaacccgccacaagtggtagtgagacaccaggatcagaacctgctacctcagggtcagagacacccggatctccggcaggctcaccaacctccactgaggagggcaccagcacagaaccaagcgagggctccgcacccggaacaagcactgaacccagtgagggttcagcacccggctctgagccggccacaagtggcagtgagacacccggcacttcagagagtgccacccccgagagtggcccaggcactagtaccgagccctctgaaggcagtgcgccagcctcgagcgaacaaaaactcatctcagaagaggatctgtcacctgcaaccggtcatcatcaccatcaccattga

SEQ ID NO: 1259 - protein, 2203 aa, synthetic construct
  REGION 1..2203: note = Description of Artificial Sequence: Synthetic polypeptide
ATRRYYLGAVELSWDYMQSDLGELPVDARFPPRVPKSFPFGAPGSSPSASTGTGPGSSPSASTGTGPGASPGTSSTGSPGASPGTSSTGSPGSSTPSGATGSPGSSPSASTGTGPGASPGTSSTGSPGSSPSASTGTGPGTPGSGTASSSPGSSTPSGATGSPGSSTPSGATGSPGASPGTSSTGSPASSNTSVVYKKTLFVEFTDHLFNIAKPRPPWMGLLGPTIQAEVYDTVVITLKNMASHPVSLHAVGVSYWKASEGAEYDDQTSQREKEDDKVFPGGSHTYVWQVLKENGPMASDPLCLTYSYLSHVDLVKDLNSGLIGALLVCREGSLAKEKTQTLHKFILLFAVFDEGKSWHSETKNSLMQDRDAASARAWPKMHTVNGYVNRSLPGLIGCHRKSVYWHVIGMGTTPEVHSIFLEGHTFLVRNHRQASLEISPITFLTAQTLLMDLGQFLLFCHISSHQHDGMEAYVKVDSCPEEPQLRMKNNEEAEDYDDDLTDSEMDVVRFDDDNSPSFIQIRSVAKKHPKTWVHYIAAEEEDWDYAPLVLAPDDRSYKSQYLNNGPQRIGRKYKKVRFMAYTDETFKTREAIQHESGILGPLLYGEVGDTLLIIFKNQASRPYNIYPHGITDVRPLYSRRLPKGVKHLKDFPILPGEIFKYKWTVTVEDGPTKSDPRCLTRYYSSFVNMERDLASGLIGPLLICYKESVDQRGNQIMSDKRNVILFSVFDENRSWYLTENIQRFLPNPAGVQLEDPEFQASNIMHSINGYVFDSLQLSVCLHEVAYWYILSIGAQTDFLSVFFSGYTFKHKMVYEDTLTLFPFSGETVFMSMENPGLWILGCHNSDFRNRGMTALLKVSSCDKNTGDYYEDSYEDISAYLLSKNNAIEPRSFSQNGAPSPAGSPTSTEEGTSESATPESGPGSEPATSGSETPGTSESATPESGPGTSTEPSEGSAPGTSTEPSEGSAPGTSTEPSEGSAPGTSTEPSEGSAPGTSTEPSEGSAPGTSTEPSEGSAPGSPAGSPTSTEEGTSTEPSEGSAPGASSPPVLKRHQAEITRTTLQSDQEEIDYDDTISVEMKKEDFDIYDEDENQSPRSFQKKTRHYFIAAVERLWDYGMSSSPHVLRNRAQSGSVPQFKKVVFQEFTDGSFTQPLYRGELNEHLGLLGPYIRAEVEDNIMVTFRNQASRPYSFYSSLISYEEDQRQGAEPRKNFVKPNETKTYFWKVQHHMAPTKDEFDCKAWAYFSDVDLEKDVHSGLIGPLLVCHTNTLNPAHGRQVTVQEFALFFTIFDETKSWYFTENMERNCRGAPGTPGSGTASSSPGASPGTSSTGSPGASPGTSSTGSPGASPGTSSTGSPGSSPSASTGTGPGTPGSGTASSSPGASPGTSSTGSPGASPGTSSTGSPGASPGTSSTGSPGSSTPSGATGSPGSSTPSGATGSPGASPGTSSTGSPASSAPCNIQMEDPTFKENYRFHAINGYIMDTLPGLVMAQDQRIRWYLLSMGSNENIHSIHFSGHVFTVRKKEEYKMALYNLYPGVFETVEMLPSKAGIWRVECLIGEHLHAGMSTLFLVYSNKCQTPLGMASGHIRDFQITASGQYGQWAPKLARLHYSGSINAWSTKEPFSWIKVDLLAPMIIHGIKTQGARQKFSSLYISQFIIMYSLDGKKWQTYRGNSTGTLMVFFGNVDSSGIKHNIFNPPIIARYIRLHPTHYSIRSTLRMELMGCDLNSCSMPLGMESKAISDAQITASSYFTNMFATWSPSKARLHLQGRSNAWRPQVNNPKEWLQVDFQKTMKVTGVTTQGVKSLLTSMYVKEFLISSSQDGHQWTLFFQNGKVKVFQGNQDSFTPVVNSLDPPLLTRYLRIHPQSWVHQIALRMEVLGCEAQDLYGAPGTSESATPESGPGSEPATSGSETPGTSESATPESGPGSEPATSGSETPGTSESATPESGPGTSTEPSEGSAPGSPAGSPTSTEEGTSESATPESGPGSEPATSGSETPGTSESATPESGPGSPAGSPTSTEEGSPAGSPTSTEEGTSTEPSEGSAPGTSESATPESGPGTSESATPESGPGTSESATPESGPGSEPATSGSETPGSEPATSGSETPGSPAGSPTSTEEGTSTEPSEGSAPGTSTEPSEGSAPGSEPATSGSETPGTSESATPESGPGTSTEPSEGSAPASSEQKLISEEDLSPATGHHHHHH

SEQ ID NO: 1260 - DNA, 6612 bp, synthetic construct
  misc_feature 1..6612: note = Description of Artificial Sequence: Synthetic polynucleotide
  source 1..6612: mol_type = other DNA
gccaccagaagatactacctgggtgcagtggaactgtcatgggactatatgcaaagtgatctcggtgagctgcctgtggacgcaagatttcctcctagagtgccaaaatcttttccattcggcgcgccaggctccagcccctccgcgagcacgggaaccggaccaggttcgtcaccctcagcatcaacggggacgggaccgggggcgtcaccaggaacgtcctccaccggctcgccgggtgcatcacccggaacgtcatcgaccggatcgccagggagctcgacgccatcaggcgcaacaggatcacctggctcaagccctagcgcgtcaaccggcacgggtccgggtgcctcccctggcacgtccagcaccggatcacccggatcgagcccatccgcctcaaccggaaccggacccggtacaccagggtcgggaacagcctcctcgtcaccaggctcctcaaccccctcgggagccacgggttcgcccggttcgtcaacgccttccggagcaactggtagccccggagcatcgccaggaacttcgagcacggggtcgcccgcctcgagcaacacctcagtcgtgtacaaaaagactctgtttgtagaattcacggatcaccttttcaacatcgctaagccaaggccaccctggatgggtctgctaggtcctaccatccaggctgaggtttatgatacagtggtcattacacttaagaacatggcttcccatcctgtcagtcttcatgctgttggtgtatcctactggaaagcttctgagggagctgaatatgatgatcagaccagtcaaagggagaaagaagatgataaagtcttccctggtggaagccatacatatgtctggcaggtcctgaaagagaatggtccaatggcctctgacccactgtgccttacctactcatatctttctcatgtggacctggtaaaagacttgaattcaggcctcattggagccctactagtatgtagagaagggagtctggccaaggaaaagacacagaccttgcacaaatttatactactttttgctgtatttgatgaagggaaaagttggcactcagaaacaaagaactccttgatgcaggatagggatgctgcatctgctcgggcctggcctaaaatgcacacagtcaatggttatgtaaacaggtctctgccaggtctgattggatgccacaggaaatcagtctattggcatgtgattggaatgggcaccactcctgaagtgcactcaatattcctcgaaggtcacacatttcttgtgaggaaccatcgccaggctagcttggaaatctcgccaataactttccttactgctcaaacactcttgatggaccttggacagtttctactgttttgtcatatctcttcccaccaacatgatggcatggaagcttatgtcaaagtagacagctgtccagaggaaccccaactacgaatgaaaaataatgaagaagcggaagactatgatgatgatcttactgattctgaaatggatgtggtcaggtttgatgatgacaactctccttcctttatccaaattcgctcagttgccaagaagcatcctaaaacttgggtacattacattgctgctgaagaggaggactgggactatgctcccttagtcctcgcccccgatgacagaagttataaaagtcaatatttgaacaatggccctcagcggattggtaggaagtacaaaaaagtccgatttatggcatacacagatgaaacctttaagactcgtgaagctattcagcatgaatcaggaatcttgggacctttactttatggggaagttggagacacactgttgattatatttaagaatcaagcaagcagaccatataacatctaccctcacggaatcactgatgtccgtcctttgtattcaaggagattaccaaaaggtgtaaaacatttgaaggattttccaattctgccaggagaaatattcaaatataaatggacagtgactgtagaagatgggccaactaaatcagatcctcggtgcctgacccgctattactctagtttcgttaatatggagagagatctagcttcaggactcattggccctctcctcatctgctacaaagaatctgtagatcaaagaggaaaccagataatgtcagacaagaggaatgtcatcctgttttctgtatttgatgagaaccgaagctggtacctcacagagaatatacaacgctttctccccaatccagctggagtgcagcttgaggatccagagttccaagcctccaacatcatgcacagcatcaatggctatgtttttgatagtttgcagttgtcagtttgtttgcatgaggtggcatactggtacattctaagcattggagcacagactgacttcctttctgtcttcttctctggatataccttcaaacacaaaatggtctatgaagacacactcaccctattcccattctcaggagaaactgtcttcatgtcgatggaaaacccaggtctatggattctggggtgccacaactcagactttcggaacagaggcatgaccgccttactgaaggtttctagttgtgacaagaacactggtgattattacgaggacagttatgaagatatttcagcatacttgctgagtaaaaacaatgccattgaaccaagaagcttctctcaaaacggcgcgccaagtcccgctggaagcccaactagcaccgaagaggggacctcagagtccgccacccccgagtccggccctggctctgagcctgccactagcggctccgagactcctggcacatccgaaagcgctacacccgagagtggacccggcacctctaccgagcccagtgagggctccgcccctggaacaagcaccgagcccagcgaaggcagcgccccagggacctccacagagcccagtgaaggcagtgctcctggcaccagcaccgaaccaagcgagggctctgcacccgggacctccaccgagccaagcgaaggctctgcccctggcacttccaccgagcccagcgaaggcagcgcccctgggagccccgctggctctcccaccagcactgaggagggcacatctaccgaaccaagtgaaggctctgcaccaggtgcctcgagcccaccagtcttgaaacgccatcaagctgaaataactcgtactactcttcagtcagatcaagaggaaatcgattatgatgataccatatcagttgaaatgaagaaggaagattttgacatttatgatgaggatgaaaatcagagcccccgcagctttcaaaagaaaacacgacactattttattgctgcagtggagaggctctgggattatgggatgagtagctccccacatgttctaagaaacagggctcagagtggcagtgtccctcagttcaagaaagttgttttccaggaatttactgatggctcctttactcagcccttataccgtggagaactaaatgaacatttgggactcctggggccatatataagagcagaagttgaagataatatcatggtaactttcagaaatcaggcctctcgtccctattccttctattctagccttatttcttatgaggaagatcagaggcaaggagcagaacctagaaaaaactttgtcaagcctaatgaaaccaaaacttacttttggaaagtgcaacatcatatggcacccactaaagatgagtttgactgcaaagcctgggcttatttctctgatgttgacctggaaaaagatgtgcactcaggcctgattggaccccttctggtctgccacactaacacactgaaccctgctcatgggagacaagtgacagtacaggaatttgctctgtttttcaccatctttgatgagaccaaaagctggtacttcactgaaaatatggaaagaaactgcaggggcgcgccaggtacacccggatcgggtacagcgtcatcgagccccggtgcgtcacctggtacgtcgagcacggggtcgccaggggcgtcccctgggacgtcctcaacaggctcgcccggtgcgtcacccggcacgtcgtccacgggttcacctggtagctccccttccgcgtccactggcaccgggcctggaactccggggagcggcacagcgagctcgtcgccgggagcatcgcctgggacatcgagcaccgggtcgccaggagcatcgcccggaacatccagcacaggaagccccggcgcgtcgcccgggacatcaagcacaggttccccgggatcgagcacgccgtccggagccactggatcaccagggagctcgacaccttccggcgcaacgggatcgcccggagccagcccgggtacgtcaagcactggctcccctgcctcgagcgctccctgcaatatccagatggaagatcccacttttaaagagaattatcgcttccatgcaatcaatggctacataatggatacactacctggcttagtaatggctcaggatcaaaggattcgatggtatctgctcagcatgggcagcaatgaaaacatccattctattcatttcagtggacatgtgttcactgtacgaaaaaaagaggagtataaaatggcactgtacaatctctatccaggtgtttttgagacagtggaaatgttaccatccaaagctggaatttggcgggtggaatgccttattggcgagcatctacatgctgggatgagcacactttttctggtgtacagcaataagtgtcagactcccctgggaatggcttctggacacattagagattttcagattacagcttcaggacaatatggacagtgggccccaaagctggccagacttcattattccggatcaatcaatgcctggagcaccaaggagcccttttcttggatcaaggtggatctgttggcaccaatgattattcacggcatcaagacccagggtgcccgtcagaagttctccagcctctacatctctcagtttatcatcatgtatagtcttgatgggaagaagtggcagacttatcgaggaaattccactggaaccttaatggtcttctttggcaatgtggattcatctgggataaaacacaatatttttaaccctccaattattgctcgatacatccgtttgcacccaactcattatagcattcgcagcactcttcgcatggagttgatgggctgtgatttaaatagttgcagcatgccattgggaatggagagtaaagcaatatcagatgcacagattactgcttcatcctactttaccaatatgtttgccacctggtctccttcaaaagctcgacttcacctccaagggaggagtaatgcctggagacctcaggtgaataatccaaaagagtggctgcaagtggacttccagaagacaatgaaagtcacaggagtaactactcagggagtaaaatctctgcttaccagcatgtatgtgaaggagttcctcatctccagcagtcaagatggccatcagtggactctcttttttcagaatggcaaagtaaaggtttttcagggaaatcaagactccttcacacctgtggtgaactctctagacccaccgttactgactcgctaccttcgaattcacccccagagttgggtgcaccagattgccctgaggatggaggttctgggctgcgaggcacaggacctctacggcgcgccaggtacctcagagtctgctacccccgagtcagggccaggatcagagccagccacctccgggtctgagacacccgggacttccgagagtgccacccctgagtccggacccgggtccgagcccgccacttccggctccgaaactcccggcacaagcgagagcgctaccccagagtcaggaccaggaacatctacagagccctctgaaggctccgctccagggtccccagccggcagtcccactagcaccgaggagggaacctctgaaagcgccacacccgaatcagggccagggtctgagcctgctaccagcggcagcgagacaccaggcacctctgagtccgccacaccagagtccggacccggatctcccgctgggagccccacctccactgaggagggatctcctgctggctctccaacatctactgaggaaggtacctcaaccgagccatccgagggatcagctcccggcacctcagagtcggcaaccccggagtctggacccggaacttccgaaagtgccacaccagagtccggtcccgggacttcagaatcagcaacacccgagtccggccctgggtctgaacccgccacaagtggtagtgagacaccaggatcagaacctgctacctcagggtcagagacacccggatctccggcaggctcaccaacctccactgaggagggcaccagcacagaaccaagcgagggctccgcacccggaacaagcactgaacccagtgagggttcagcacccggctctgagccggccacaagtggcagtgagacacccggcacttcagagagtgccacccccgagagtggcccaggcactagtaccgagccctctgaaggcagtgcgccagcctcgagcgaacaaaaactcatctcagaagaggatctgtcacctgcaaccggtcatcatcaccatcaccattga

SEQ ID NO: 1261 - protein, 2203 aa, synthetic construct
  REGION 1..2203: note = Description of Artificial Sequence: Synthetic polypeptide
ATRRYYLGAVELSWDYMQSDLGELPVDARFPPRVPKSFPFGAPGSSPSASTGTGPGSSPSASTGTGPGASPGTSSTGSPGASPGTSSTGSPGSSTPSGATGSPGSSPSASTGTGPGASPGTSSTGSPGSSPSASTGTGPGTPGSGTASSSPGSSTPSGATGSPGSSTPSGATGSPGASPGTSSTGSPASSNTSVVYKKTLFVEFTDHLFNIAKPRPPWMGLLGPTIQAEVYDTVVITLKNMASHPVSLHAVGVSYWKASEGAEYDDQTSQREKEDDKVFPGGSHTYVWQVLKENGPMASDPLCLTYSYLSHVDLVKDLNSGLIGALLVCREGSLAKEKTQTLHKFILLFAVFDEGKSWHSETKNSLMQDRDAASARAWPKMHTVNGYVNRSLPGLIGCHRKSVYWHVIGMGTTPEVHSIFLEGHTFLVRNHRQASLEISPITFLTAQTLLMDLGQFLLFCHISSHQHDGMEAYVKVDSCPEEPQLRMKNNEEAEDYDDDLTDSEMDVVRFDDDNSPSFIQIRSVAKKHPKTWVHYIAAEEEDWDYAPLVLAPDDRSYKSQYLNNGPQRIGRKYKKVRFMAYTDETFKTREAIQHESGILGPLLYGEVGDTLLIIFKNQASRPYNIYPHGITDVRPLYSRRLPKGVKHLKDFPILPGEIFKYKWTVTVEDGPTKSDPRCLTRYYSSFVNMERDLASGLIGPLLICYKESVDQRGNQIMSDKRNVILFSVFDENRSWYLTENIQRFLPNPAGVQLEDPEFQASNIMHSINGYVFDSLQLSVCLHEVAYWYILSIGAQTDFLSVFFSGYTFKHKMVYEDTLTLFPFSGETVFMSMENPGLWILGCHNSDFRNRGMTALLKVSSCDKNTGDYYEDSYEDISAYLLSKNNAIEPRSFSQNGAPSPAGSPTSTEEGTSESATPESGPGSEPATSGSETPGTSESATPESGPGTSTEPSEGSAPGTSTEPSEGSAPGTSTEPSEGSAPGTSTEPSEGSAPGTSTEPSEGSAPGTSTEPSEGSAPGSPAGSPTSTEEGTSTEPSEGSAPGASSPPVLKRHQAEITRTTLQSDQEEIDYDDTISVEMKKEDFDIYDEDENQSPRSFQKKTRHYFIAAVERLWDYGMSSSPHVLRNRAQSGSVPQFKKVVFQEFTDGSFTQPLYRGELNEHLGLLGPYIRAEVEDNIMVTFRNQASRPYSFYSSLISYEEDQRQGAEPRKNFVKPNETKTYFWKVQHHMAPTKDEFDCKAWAYFSDVDLEKDVHSGLIGPLLVCHTNTLNPAHGRQVTVQEFALFFTIFDETKSWYFTENMERNCRAPCNIGAPSPAGSPTSTEEGTSESATPESGPGTSTEPSEGSAPGSPAGSPTSTEEGTSTEPSEGSAPGTSTEPSEGSAPGTSESATPESGPGSEPATSGSETPGSEPATSGSETPGSPAGSPTSTEEGTSESATPESGPGTSTEPSEGSAPGASSQMEDPTFKENYRFHAINGYIMDTLPGLVMAQDQRIRWYLLSMGSNENIHSIHFSGHVFTVRKKEEYKMALYNLYPGVFETVEMLPSKAGIWRVECLIGEHLHAGMSTLFLVYSNKCQTPLGMASGHIRDFQITASGQYGQWAPKLARLHYSGSINAWSTKEPFSWIKVDLLAPMIIHGIKTQGARQKFSSLYISQFIIMYSLDGKKWQTYRGNSTGTLMVFFGNVDSSGIKHNIFNPPIIARYIRLHPTHYSIRSTLRMELMGCDLNSCSMPLGMESKAISDAQITASSYFTNMFATWSPSKARLHLQGRSNAWRPQVNNPKEWLQVDFQKTMKVTGVTTQGVKSLLTSMYVKEFLISSSQDGHQWTLFFQNGKVKVFQGNQDSFTPVVNSLDPPLLTRYLRIHPQSWVHQIALRMEVLGCEAQDLYGAPGTSESATPESGPGSEPATSGSETPGTSESATPESGPGSEPATSGSETPGTSESATPESGPGTSTEPSEGSAPGSPAGSPTSTEEGTSESATPESGPGSEPATSGSETPGTSESATPESGPGSPAGSPTSTEEGSPAGSPTSTEEGTSTEPSEGSAPGTSESATPESGPGTSESATPESGPGTSESATPESGPGSEPATSGSETPGSEPATSGSETPGSPAGSPTSTEEGTSTEPSEGSAPGTSTEPSEGSAPGSEPATSGSETPGTSESATPESGPGTSTEPSEGSAPASSEQKLISEEDLSPATGHHHHHH

SEQ ID NO: 1262 - DNA, 6612 bp, synthetic construct
  misc_feature 1..6612: note = Description of Artificial Sequence: Synthetic polynucleotide
  source 1..6612: mol_type = other DNA
gccaccagaagatactacctgggtgcagtggaactgtcatgggactatatgcaaagtgatctcggtgagctgcctgtggacgcaagatttcctcctagagtgccaaaatcttttccattcggcgcgccaggctccagcccctccgcgagcacgggaaccggaccaggttcgtcaccctcagcatcaacggggacgggaccgggggcgtcaccaggaacgtcctccaccggctcgccgggtgcatcacccggaacgtcatcgaccggatcgccagggagctcgacgccatcaggcgcaacaggatcacctggctcaagccctagcgcgtcaaccggcacgggtccgggtgcctcccctggcacgtccagcaccggatcacccggatcgagcccatccgcctcaaccggaaccggacccggtacaccagggtcgggaacagcctcctcgtcaccaggctcctcaaccccctcgggagccacgggttcgcccggttcgtcaacgccttccggagcaactggtagccccggagcatcgccaggaacttcgagcacggggtcgcccgcctcgagcaacacctcagtcgtgtacaaaaagactctgtttgtagaattcacggatcaccttttcaacatcgctaagccaaggccaccctggatgggtctgctaggtcctaccatccaggctgaggtttatgatacagtggtcattacacttaagaacatggcttcccatcctgtcagtcttcatgctgttggtgtatcctactggaaagcttctgagggagctgaatatgatgatcagaccagtcaaagggagaaagaagatgataaagtcttccctggtggaagccatacatatgtctggcaggtcctgaaagagaatggtccaatggcctctgacccactgtgccttacctactcatatctttctcatgtggacctggtaaaagacttgaattcaggcctcattggagccctactagtatgtagagaagggagtctggccaaggaaaagacacagaccttgcacaaatttatactactttttgctgtatttgatgaagggaaaagttggcactcagaaacaaagaactccttgatgcaggatagggatgctgcatctgctcgggcctggcctaaaatgcacacagtcaatggttatgtaaacaggtctctgccaggtctgattggatgccacaggaaatcagtctattggcatgtgattggaatgggcaccactcctgaagtgcactcaatattcctcgaaggtcacacatttcttgtgaggaaccatcgccaggctagcttggaaatctcgccaataactttccttactgctcaaacactcttgatggaccttggacagtttctactgttttgtcatatctcttcccaccaacatgatggcatggaagcttatgtcaaagtagacagctgtccagaggaaccccaactacgaatgaaaaataatgaagaagcggaagactatgatgatgatcttactgattctgaaatggatgtggtcaggtttgatgatgacaactctccttcctttatccaaattcgctcagttgccaagaagcatcctaaaacttgggtacattacattgctgctgaagaggaggactgggactatgctcccttagtcctcgcccccgatgacagaagttataaaagtcaatatttgaacaatggccctcagcggattggtaggaagtacaaaaaagtccgatttatggcatacacagatgaaacctttaagactcgtgaagctattcagcatgaatcaggaatcttgggacctttactttatggggaagttggagacacactgttgattatatttaagaatcaagcaagcagaccatataacatctaccctcacggaatcactgatgtccgtcctttgtattcaaggagattaccaaaaggtgtaaaacatttgaaggattttccaattctgccaggagaaatattcaaatataaatggacagtgactgtagaagatgggccaactaaatcagatcctcggtgcctgacccgctattactctagtttcgttaatatggagagagatctagcttcaggactcattggccctctcctcatctgctacaaagaatctgtagatcaaagaggaaaccagataatgtcagacaagaggaatgtcatcctgttttctgtatttgatgagaaccgaagctggtacctcacagagaatatacaacgctttctccccaatccagctggagtgcagcttgaggatccagagttccaagcctccaacatcatgcacagcatcaatggctatgtttttgatagtttgcagttgtcagtttgtttgcatgaggtggcatactggtacattctaagcattggagcacagactgacttcctttctgtcttcttctctggatataccttcaaacacaaaatggtctatgaagacacactcaccctattcccattctcaggagaaactgtcttcatgtcgatggaaaacccaggtctatggattctggggtgccacaactcagactttcggaacagaggcatgaccgccttactgaaggtttctagttgtgacaagaacactggtgattattacgaggacagttatgaagatatttcagcatacttgctgagtaaaaacaatgccattgaaccaagaagcttctctcaaaacggcgcgccaagtcccgctggaagcccaactagcaccgaagaggggacctcagagtccgccacccccgagtccggccctggctctgagcctgccactagcggctccgagactcctggcacatccgaaagcgctacacccgagagtggacccggcacctctaccgagcccagtgagggctccgcccctggaacaagcaccgagcccagcgaaggcagcgccccagggacctccacagagcccagtgaaggcagtgctcctggcaccagcaccgaaccaagcgagggctctgcacccgggacctccaccgagccaagcgaaggctctgcccctggcacttccaccgagcccagcgaaggcagcgcccctgggagccccgctggctctcccaccagcactgaggagggcacatctaccgaaccaagtgaaggctctgcaccaggtgcctcgagcccaccagtcttgaaacgccatcaagctgaaataactcgtactactcttcagtcagatcaagaggaaatcgattatgatgataccatatcagttgaaatgaagaaggaagattttgacatttatgatgaggatgaaaatcagagcccccgcagctttcaaaagaaaacacgacactattttattgctgcagtggagaggctctgggattatgggatgagtagctccccacatgttctaagaaacagggctcagagtggcagtgtccctcagttcaagaaagttgttttccaggaatttactgatggctcctttactcagcccttataccgtggagaactaaatgaacatttgggactcctggggccatatataagagcagaagttgaagataatatcatggtaactttcagaaatcaggcctctcgtccctattccttctattctagccttatttcttatgaggaagatcagaggcaaggagcagaacctagaaaaaactttgtcaagcctaatgaaaccaaaacttacttttggaaagtgcaacatcatatggcacccactaaagatgagtttgactgcaaagcctgggcttatttctctgatgttgacctggaaaaagatgtgcactcaggcctgattggaccccttctggtctgccacactaacacactgaaccctgctcatgggagacaagtgacagtacaggaatttgctctgtttttcaccatctttgatgagaccaaaagctggtacttcactgaaaatatggaaagaaactgcagggctccctgcaatatcggcgcgccatctccagccgggtccccaacttcgaccgaggaagggacctccgagtcagctaccccggagtccggtcctggcacctccaccgaaccatcggagggcagcgcccctgggagccctgccgggagccctacaagcaccgaagagggcaccagtacagagccaagtgaggggagcgcccctggtactagtactgaaccatccgaggggtcagctccaggcacgagtgagtccgctacccccgagagcggaccgggctcagagcccgccacgagtggcagtgaaactccaggctcagaacccgccactagtgggtcagagactccaggcagccctgccggatcccctacgtccaccgaggagggaacatctgagtccgcaacacccgaatccggtccaggcacctccacggaacctagtgaaggctcggcaccaggtgcctcgagccagatggaagatcccacttttaaagagaattatcgcttccatgcaatcaatggctacataatggatacactacctggcttagtaatggctcaggatcaaaggattcgatggtatctgctcagcatgggcagcaatgaaaacatccattctattcatttcagtggacatgtgttcactgtacgaaaaaaagaggagtataaaatggcactgtacaatctctatccaggtgtttttgagacagtggaaatgttaccatccaaagctggaatttggcgggtggaatgccttattggcgagcatctacatgctgggatgagcacactttttctggtgtacagcaataagtgtcagactcccctgggaatggcttctggacacattagagattttcagattacagcttcaggacaatatggacagtgggccccaaagctggccagacttcattattccggatcaatcaatgcctggagcaccaaggagcccttttcttggatcaaggtggatctgttggcaccaatgattattcacggcatcaagacccagggtgcccgtcagaagttctccagcctctacatctctcagtttatcatcatgtatagtcttgatgggaagaagtggcagacttatcgaggaaattccactggaaccttaatggtcttctttggcaatgtggattcatctgggataaaacacaatatttttaaccctccaattattgctcgatacatccgtttgcacccaactcattatagcattcgcagcactcttcgcatggagttgatgggctgtgatttaaatagttgcagcatgccattgggaatggagagtaaagcaatatcagatgcacagattactgcttcatcctactttaccaatatgtttgccacctggtctccttcaaaagctcgacttcacctccaagggaggagtaatgcctggagacctcaggtgaataatccaaaagagtggctgcaagtggacttccagaagacaatgaaagtcacaggagtaactactcagggagtaaaatctctgcttaccagcatgtatgtgaaggagttcctcatctccagcagtcaagatggccatcagtggactctcttttttcagaatggcaaagtaaaggtttttcagggaaatcaagactccttcacacctgtggtgaactctctagacccaccgttactgactcgctaccttcgaattcacccccagagttgggtgcaccagattgccctgaggatggaggttctgggctgcgaggcacaggacctctacggcgcgccaggtacctcagagtctgctacccccgagtcagggccaggatcagagccagccacctccgggtctgagacacccgggacttccgagagtgccacccctgagtccggacccgggtccgagcccgccacttccggctccgaaactcccggcacaagcgagagcgctaccccagagtcaggaccaggaacatctacagagccctctgaaggctccgctccagggtccccagccggcagtcccactagcaccgaggagggaacctctgaaagcgccacacccgaatcagggccagggtctgagcctgctaccagcggcagcgagacaccaggcacctctgagtccgccacaccagagtccggacccggatctcccgctgggagccccacctccactgaggagggatctcctgctggctctccaacatctactgaggaaggtacctcaaccgagccatccgagggatcagctcccggcacctcagagtcggcaaccccggagtctggacccggaacttccgaaagtgccacaccagagtccggtcccgggacttcagaatcagcaacacccgagtccggccctgggtctgaacccgccacaagtggtagtgagacaccaggatcagaacctgctacctcagggtcagagacacccggatctccggcaggctcaccaacctccactgaggagggcaccagcacagaaccaagcgagggctccgcacccggaacaagcactgaacccagtgagggttcagcacccggctctgagccggccacaagtggcagtgagacacccggcacttcagagagtgccacccccgagagtggcccaggcactagtaccgagccctctgaaggcagtgcgccagcctcgagcgaacaaaaactcatctcagaagaggatctgtcacctgcaaccggtcatcatcaccatcaccattga

SEQ ID NO: 1263 - protein, 2203 aa, synthetic construct
  REGION 1..2203: note = Description of Artificial Sequence: Synthetic polypeptide
ATRRYYLGAVELSWDYMQSDLGELPVGAPGSSPSASTGTGPGSSPSASTGTGPGASPGTSSTGSPGASPGTSSTGSPGSSTPSGATGSPGSSPSASTGTGPGASPGTSSTGSPGSSPSASTGTGPGTPGSGTASSSPGSSTPSGATGSPGSSTPSGATGSPGASPGTSSTGSPASSDARFPPRVPKSFPFNTSVVYKKTLFVEFTDHLFNIAKPRPPWMGLLGPTIQAEVYDTVVITLKNMASHPVSLHAVGVSYWKASEGAEYDDQTSQREKEDDKVFPGGSHTYVWQVLKENGPMASDPLCLTYSYLSHVDLVKDLNSGLIGALLVCREGSLAKEKTQTLHKFILLFAVFDEGKSWHSETKNSLMQDRDAASARAWPKMHTVNGYVNRSLPGLIGCHRKSVYWHVIGMGTTPEVHSIFLEGHTFLVRNHRQASLEISPITFLTAQTLLMDLGQFLLFCHISSHQHDGMEAYVKVDSCPEEPQLRMKNNEEAEDYDDDLTDSEMDVVRFDDDNSPSFIQIRSVAKKHPKTWVHYIAAEEEDWDYAPLVLAPDDRSYKSQYLNNGPQRIGRKYKKVRFMAYTDETFKTREAIQHESGILGPLLYGEVGDTLLIIFKNQASRPYNIYPHGITDVRPLYSRRLPKGVKHLKDFPILPGEIFKYKWTVTVEDGPTKSDPRCLTRYYSSFVNMERDLASGLIGPLLICYKESVDQRGNQIMSDKRNVILFSVFDENRSWYLTENIQRFLPNPAGVQLEDPEFQASNIMHSINGYVFDSLQLSVCLHEVAYWYILSIGAQTDFLSVFFSGYTFKHKMVYEDTLTLFPFSGETVFMSMENPGLWILGCHNSDFRNRGMTALLKVSSCDKNTGDYYEDSYEDISAYLLSKNNAIEPRSFSQNGAPSPAGSPTSTEEGTSESATPESGPGSEPATSGSETPGTSESATPESGPGTSTEPSEGSAPGTSTEPSEGSAPGTSTEPSEGSAPGTSTEPSEGSAPGTSTEPSEGSAPGTSTEPSEGSAPGSPAGSPTSTEEGTSTEPSEGSAPGASSPPVLKRHQAEITRTTLQSDQEEIDYDDTISVEMKKEDFDIYDEDENQSPRSFQKKTRHYFIAAVERLWDYGMSSSPHVLRNRAQSGSVPQFKKVVFQEFTDGSFTQPLYRGELNEHLGLLGPYIRAEVEDNIMVTFRNQASRPYSFYSSLISYEEDQRQGAEPRKNFVKPNETKTYFWKVQHHMAPTKDEFDCKAWAYFSDVDLEKDVHSGLIGPLLVCHTNTLNPAHGRQVTVQEFALFFTIFDETKSWYFTENMERNCRAPCNIGAPSPAGSPTSTEEGTSESATPESGPGTSTEPSEGSAPGSPAGSPTSTEEGTSTEPSEGSAPGTSTEPSEGSAPGTSESATPESGPGSEPATSGSETPGSEPATSGSETPGSPAGSPTSTEEGTSESATPESGPGTSTEPSEGSAPGASSQMEDPTFKENYRFHAINGYIMDTLPGLVMAQDQRIRWYLLSMGSNENIHSIHFSGHVFTVRKKEEYKMALYNLYPGVFETVEMLPSKAGIWRVECLIGEHLHAGMSTLFLVYSNKCQTPLGMASGHIRDFQITASGQYGQWAPKLARLHYSGSINAWSTKEPFSWIKVDLLAPMIIHGIKTQGARQKFSSLYISQFIIMYSLDGKKWQTYRGNSTGTLMVFFGNVDSSGIKHNIFNPPIIARYIRLHPTHYSIRSTLRMELMGCDLNSCSMPLGMESKAISDAQITASSYFTNMFATWSPSKARLHLQGRSNAWRPQVNNPKEWLQVDFQKTMKVTGVTTQGVKSLLTSMYVKEFLISSSQDGHQWTLFFQNGKVKVFQGNQDSFTPVVNSLDPPLLTRYLRIHPQSWVHQIALRMEVLGCEAQDLYGAPGTSESATPESGPGSEPATSGSETPGTSESATPESGPGSEPATSGSETPGTSESATPESGPGTSTEPSEGSAPGSPAGSPTSTEEGTSESATPESGPGSEPATSGSETPGTSESATPESGPGSPAGSPTSTEEGSPAGSPTSTEEGTSTEPSEGSAPGTSESATPESGPGTSESATPESGPGTSESATPESGPGSEPATSGSETPGSEPATSGSETPGSPAGSPTSTEEGTSTEPSEGSAPGTSTEPSEGSAPGSEPATSGSETPGTSESATPESGPGTSTEPSEGSAPASSEQKLISEEDLSPATGHHHHHH

SEQ ID NO: 1264 - DNA, 6612 bp, synthetic construct
  misc_feature 1..6612: note = Description of Artificial Sequence: Synthetic polynucleotide
  source 1..6612: mol_type = other DNA
gccaccagaagatactacctgggtgcagtggaactgtcatgggactatatgcaaagtgatctcggtgagctgcctgtgggcgcgccaggctccagcccctccgcgagcacgggaaccggaccaggttcgtcaccctcagcatcaacggggacgggaccgggggcgtcaccaggaacgtcctccaccggctcgccgggtgcatcacccggaacgtcatcgaccggatcgccagggagctcgacgccatcaggcgcaacaggatcacctggctcaagccctagcgcgtcaaccggcacgggtccgggtgcctcccctggcacgtccagcaccggatcacccggatcgagcccatccgcctcaaccggaaccggacccggtacaccagggtcgggaacagcctcctcgtcaccaggctcctcaaccccctcgggagccacgggttcgcccggttcgtcaacgccttccggagcaactggtagccccggagcatcgccaggaacttcgagcacggggtcgcccgcctcgagcgacgcaagatttcctcctagagtgccaaaatcttttccattcaacacctcagtcgtgtacaaaaagactctgtttgtagaattcacggatcaccttttcaacatcgctaagccaaggccaccctggatgggtctgctaggtcctaccatccaggctgaggtttatgatacagtggtcattacacttaagaacatggcttcccatcctgtcagtcttcatgctgttggtgtatcctactggaaagcttctgagggagctgaatatgatgatcagaccagtcaaagggagaaagaagatgataaagtcttccctggtggaagccatacatatgtctggcaggtcctgaaagagaatggtccaatggcctctgacccactgtgccttacctactcatatctttctcatgtggacctggtaaaagacttgaattcaggcctcattggagccctactagtatgtagagaagggagtctggccaaggaaaagacacagaccttgcacaaatttatactactttttgctgtatttgatgaagggaaaagttggcactcagaaacaaagaactccttgatgcaggatagggatgctgcatctgctcgggcctggcctaaaatgcacacagtcaatggttatgtaaacaggtctctgccaggtctgattggatgccacaggaaatcagtctattggcatgtgattggaatgggcaccactcctgaagtgcactcaatattcctcgaaggtcacacatttcttgtgaggaaccatcgccaggctagcttggaaatctcgccaataactttccttactgctcaaacactcttgatggaccttggacagtttctactgttttgtcatatctcttcccaccaacatgatggcatggaagcttatgtcaaagtagacagctgtccagaggaaccccaactacgaatgaaaaataatgaagaagcggaagactatgatgatgatcttactgattctgaaatggatgtggtcaggtttgatgatgacaactctccttcctttatccaaattcgctcagttgccaagaagcatcctaaaacttgggtacattacattgctgctgaagaggaggactgggactatgctcccttagtcctcgcccccgatgacagaagttataaaagtcaatatttgaacaatggccctcagcggattggtaggaagtacaaaaaagtccgatttatggcatacacagatgaaacctttaagactcgtgaagctattcagcatgaatcaggaatcttgggacctttactttatggggaagttggagacacactgttgattatatttaagaatcaagcaagcagaccatataacatctaccctcacggaatcactgatgtccgtcctttgtattcaaggagattaccaaaaggtgtaaaacatttgaaggattttccaattctgccaggagaaatattcaaatataaatggacagtgactgtagaagatgggccaactaaatcagatcctcggtgcctgacccgctattactctagtttcgttaatatggagagagatctagcttcaggactcattggccctctcctcatctgctacaaagaatctgtagatcaaagaggaaaccagataatgtcagacaagaggaatgtcatcctgttttctgtatttgatgagaaccgaagctggtacctcacagagaatatacaacgctttctccccaatccagctggagtgcagcttgaggatccagagttccaagcctccaacatcatgcacagcatcaatggctatgtttttgatagtttgcagttgtcagtttgtttgcatgaggtggcatactggtacattctaagcattggagcacagactgacttcctttctgtcttcttctctggatataccttcaaacacaaaatggtctatgaagacacactcaccctattcccattctcaggagaaactgtcttcatgtcgatggaaaacccaggtctatggattctggggtgccacaactcagactttcggaacagaggcatgaccgccttactgaaggtttctagttgtgacaagaacactggtgattattacgaggacagttatgaagatatttcagcatacttgctgagtaaaaacaatgccattgaaccaagaagcttctctcaaaacggcgcgccaagtcccgctggaagcccaactagcaccgaagaggggacctcagagtccgccacccccgagtccggccctggctctgagcctgccactagcggctccgagactcctggcacatccgaaagcgctacacccgagagtggacccggcacctctaccgagcccagtgagggctccgcccctggaacaagcaccgagcccagcgaaggcagcgccccagggacctccacagagcccagtgaaggcagtgctcctggcaccagcaccgaaccaagcgagggctctgcacccgggacctccaccgagccaagcgaaggctctgcccctggcacttccaccgagcccagcgaaggcagcgcccctgggagccccgctggctctcccaccagcactgaggagggcacatctaccgaaccaagtgaaggctctgcaccaggtgcctcgagcccaccagtcttgaaacgccatcaagctgaaataactcgtactactcttcagtcagatcaagaggaaatcgattatgatgataccatatcagttgaaatgaagaaggaagattttgacatttatgatgaggatgaaaatcagagcccccgcagctttcaaaagaaaacacgacactattttattgctgcagtggagaggctctgggattatgggatgagtagctccccacatgttctaagaaacagggctcagagtggcagtgtccctcagttcaagaaagttgttttccaggaatttactgatggctcctttactcagcccttataccgtggagaactaaatgaacatttgggactcctggggccatatataagagcagaagttgaagataatatcatggtaactttcagaaatcaggcctctcgtccctattccttctattctagccttatttcttatgaggaagatcagaggcaaggagcagaacctagaaaaaactttgtcaagcctaatgaaaccaaaacttacttttggaaagtgcaacatcatatggcacccactaaagatgagtttgactgcaaagcctgggcttatttctctgatgttgacctggaaaaagatgtgcactcaggcctgattggaccccttctggtctgccacactaacacactgaaccctgctcatgggagacaagtgacagtacaggaatttgctctgtttttcaccatctttgatgagaccaaaagctggtacttcactgaaaatatggaaagaaactgcagggctccctgcaatatcggcgcgccatctccagccgggtccccaacttcgaccgaggaagggacctccgagtcagctaccccggagtccggtcctggcacctccaccgaaccatcggagggcagcgcccctgggagccctgccgggagccctacaagcaccgaagagggcaccagtacagagccaagtgaggggagcgcccctggtactagtactgaaccatccgaggggtcagctccaggcacgagtgagtccgctacccccgagagcggaccgggctcagagcccgccacgagtggcagtgaaactccaggctcagaacccgccactagtgggtcagagactccaggcagccctgccggatcccctacgtccaccgaggagggaacatctgagtccgcaacacccgaatccggtccaggcacctccacggaacctagtgaaggctcggcaccaggtgcctcgagccagatggaagatcccacttttaaagagaattatcgcttccatgcaatcaatggctacataatggatacactacctggcttagtaatggctcaggatcaaaggattcgatggtatctgctcagcatgggcagcaatgaaaacatccattctattcatttcagtggacatgtgttcactgtacgaaaaaaagaggagtataaaatggcactgtacaatctctatccaggtgtttttgagacagtggaaatgttaccatccaaagctggaatttggcgggtggaatgccttattggcgagcatctacatgctgggatgagcacactttttctggtgtacagcaataagtgtcagactcccctgggaatggcttctggacacattagagattttcagattacagcttcaggacaatatggacagtgggccccaaagctggccagacttcattattccggatcaatcaatgcctggagcaccaaggagcccttttcttggatcaaggtggatctgttggcaccaatgattattcacggcatcaagacccagggtgcccgtcagaagttctccagcctctacatctctcagtttatcatcatgtatagtcttgatgggaagaagtggcagacttatcgaggaaattccactggaaccttaatggtcttctttggcaatgtggattcatctgggataaaacacaatatttttaaccctccaattattgctcgatacatccgtttgcacccaactcattatagcattcgcagcactcttcgcatggagttgatgggctgtgatttaaatagttgcagcatgccattgggaatggagagtaaagcaatatcagatgcacagattactgcttcatcctactttaccaatatgtttgccacctggtctccttcaaaagctcgacttcacctccaagggaggagtaatgcctggagacctcaggtgaataatccaaaagagtggctgcaagtggacttccagaagacaatgaaagtcacaggagtaactactcagggagtaaaatctctgcttaccagcatgtatgtgaaggagttcctcatctccagcagtcaagatggccatcagtggactctcttttttcagaatggcaaagtaaaggtttttcagggaaatcaagactccttcacacctgtggtgaactctctagacccaccgttactgactcgctaccttcgaattcacccccagagttgggtgcaccagattgccctgaggatggaggttctgggctgcgaggcacaggacctctacggcgcgccaggtacctcagagtctgctacccccgagtcagggccaggatcagagccagccacctccgggtctgagacacccgggacttccgagagtgccacccctgagtccggacccgggtccgagcccgccacttccggctccgaaactcccggcacaagcgagagcgctaccccagagtcaggaccaggaacatctacagagccctctgaaggctccgctccagggtccccagccggcagtcccactagcaccgaggagggaacctctgaaagcgccacacccgaatcagggccagggtctgagcctgctaccagcggcagcgagacaccaggcacctctgagtccgccacaccagagtccggacccggatctcccgctgggagccccacctccactgaggagggatctcctgctggctctccaacatctactgaggaaggtacctcaaccgagccatccgagggatcagctcccggcacctcagagtcggcaaccccggagtctggacccggaacttccgaaagtgccacaccagagtccggtcccgggacttcagaatcagcaacacccgagtccggccctgggtctgaacccgccacaagtggtagtgagacaccaggatcagaacctgctacctcagggtcagagacacccggatctccggcaggctcaccaacctccactgaggagggcaccagcacagaaccaagcgagggctccgcacccggaacaagcactgaacccagtgagggttcagcacccggctctgagccggccacaagtggcagtgagacacccggcacttcagagagtgccacccccgagagtggcccaggcactagtaccgagccctctgaaggcagtgcgccagcctcgagcgaacaaaaactcatctcagaagaggatctgtcacctgcaaccggtcatcatcaccatcaccattga

SEQ ID NO: 1265 - protein, 2203 aa, synthetic construct
  REGION 1..2203: note = Description of Artificial Sequence: Synthetic polypeptide
ATRRYYLGAVELSWDYMQGAPTSESATPESGPGSEPATSGSETPGTSESATPESGPGSEPATSGSETPGTSESATPESGPGTSTEPSEGSAPGSPAGSPTSTEEGTSESATPESGPGSEPATSGSETPGTSESATPESGPGSPAGSPTSTEEGSPAGSPTSTEEGASSSDLGELPVDARFPPRVPKSFPFNTSVVYKKTLFVEFTDHLFNIAKPRPPWMGLLGPTIQAEVYDTVVITLKNMASHPVSLHAVGVSYWKASEGAEYDDQTSQREKEDDKVFPGGSHTYVWQVLKENGPMASDPLCLTYSYLSHVDLVKDLNSGLIGALLVCREGSLAKEKTQTLHKFILLFAVFDEGKSWHSETKNSLMQDRDAASARAWPKMHTVNGYVNRSLPGLIGCHRKSVYWHVIGMGTTPEVHSIFLEGHTFLVRNHRQASLEISPITFLTAQTLLMDLGQFLLFCHISSHQHDGMEAYVKVDSCPEEPQLRMKNNEEAEDYDDDLTDSEMDVVRFDDDNSPSFIQIRSVAKKHPKTWVHYIAAEEEDWDYAPLVLAPDDRSYKSQYLNNGPQRIGRKYKKVRFMAYTDETFKTREAIQHESGILGPLLYGEVGDTLLIIFKNQASRPYNIYPHGITDVRPLYSRRLPKGVKHLKDFPILPGEIFKYKWTVTVEDGPTKSDPRCLTRYYSSFVNMERDLASGLIGPLLICYKESVDQRGNQIMSDKRNVILFSVFDENRSWYLTENIQRFLPNPAGVQLEDPEFQASNIMHSINGYVFDSLQLSVCLHEVAYWYILSIGAQTDFLSVFFSGYTFKHKMVYEDTLTLFPFSGETVFMSMENPGLWILGCHNSDFRNRGMTALLKVSSCDKNTGDYYEDSYEDISAYLLSKNNAIEPRSFSQNGAPSPAGSPTSTEEGTSESATPESGPGSEPATSGSETPGTSESATPESGPGTSTEPSEGSAPGTSTEPSEGSAPGTSTEPSEGSAPGTSTEPSEGSAPGTSTEPSEGSAPGTSTEPSEGSAPGSPAGSPTSTEEGTSTEPSEGSAPGASSPPVLKRHQAEITRTTLQSDQEEIDYDDTISVEMKKEDFDIYDEDENQSPRSFQKKTRHYFIAAVERLWDYGMSSSPHVLRNRAQSGSVPQFKKVVFQEFTDGSFTQPLYRGELNEHLGLLGPYIRAEVEDNIMVTFRNQASRPYSFYSSLISYEEDQRQGAEPRKNFVKPNETKTYFWKVQHHMAPTKDEFDCKAWAYFSDVDLEKDVHSGLIGPLLVCHTNTLNPAHGRQVTVQEFALFFTIFDETKSWYFTENMERNCRAPCNIGAPSPAGSPTSTEEGTSESATPESGPGTSTEPSEGSAPGSPAGSPTSTEEGTSTEPSEGSAPGTSTEPSEGSAPGTSESATPESGPGSEPATSGSETPGSEPATSGSETPGSPAGSPTSTEEGTSESATPESGPGTSTEPSEGSAPGASSQMEDPTFKENYRFHAINGYIMDTLPGLVMAQDQRIRWYLLSMGSNENIHSIHFSGHVFTVRKKEEYKMALYNLYPGVFETVEMLPSKAGIWRVECLIGEHLHAGMSTLFLVYSNKCQTPLGMASGHIRDFQITASGQYGQWAPKLARLHYSGSINAWSTKEPFSWIKVDLLAPMIIHGIKTQGARQKFSSLYISQFIIMYSLDGKKWQTYRGNSTGTLMVFFGNVDSSGIKHNIFNPPIIARYIRLHPTHYSIRSTLRMELMGCDLNSCSMPLGMESKAISDAQITASSYFTNMFATWSPSKARLHLQGRSNAWRPQVNNPKEWLQVDFQKTMKVTGVTTQGVKSLLTSMYVKEFLISSSQDGHQWTLFFQNGKVKVFQGNQDSFTPVVNSLDPPLLTRYLRIHPQSWVHQIALRMEVLGCEAQDLYGAPGTSESATPESGPGSEPATSGSETPGTSESATPESGPGSEPATSGSETPGTSESATPESGPGTSTEPSEGSAPGSPAGSPTSTEEGTSESATPESGPGSEPATSGSETPGTSESATPESGPGSPAGSPTSTEEGSPAGSPTSTEEGTSTEPSEGSAPGTSESATPESGPGTSESATPESGPGTSESATPESGPGSEPATSGSETPGSEPATSGSETPGSPAGSPTSTEEGTSTEPSEGSAPGTSTEPSEGSAPGSEPATSGSETPGTSESATPESGPGTSTEPSEGSAPASSEQKLISEEDLSPATGHHHHHH

SEQ ID NO: 1266 - DNA, 6612 bp, synthetic construct
  misc_feature 1..6612: note = Description of Artificial Sequence: Synthetic polynucleotide
  source 1..6612: mol_type = other DNA
gccaccagaagatactacctgggtgcagtggaactgtcatgggactatatgcaaggcgcgccaacatcagagagcgccacccctgaaagtggtcccgggagcgagccagccacatctgggtcggaaacgccaggcacaagtgagtctgcaactcccgagtccggacctggctccgagcctgccactagcggctccgagactccgggaacttccgagagcgctacaccagaaagcggacccggaaccagtaccgaacctagcgagggctctgctccgggcagcccagccggctctcctacatccacggaggagggcacttccgaatccgccaccccggagtcagggccaggatctgaacccgctacctcaggcagtgagacgccaggaacgagcgagtccgctacaccggagagtgggccagggagccctgctggatctcctacgtccactgaggaagggtcaccagcgggctcgcccaccagcactgaagaaggtgcctcgagcagtgatctcggtgagctgcctgtggacgcaagatttcctcctagagtgccaaaatcttttccattcaacacctcagtcgtgtacaaaaagactctgtttgtagaattcacggatcaccttttcaacatcgctaagccaaggccaccctggatgggtctgctaggtcctaccatccaggctgaggtttatgatacagtggtcattacacttaagaacatggcttcccatcctgtcagtcttcatgctgttggtgtatcctactggaaagcttctgagggagctgaatatgatgatcagaccagtcaaagggagaaagaagatgataaagtcttccctggtggaagccatacatatgtctggcaggtcctgaaagagaatggtccaatggcctctgacccactgtgccttacctactcatatctttctcatgtggacctggtaaaagacttgaattcaggcctcattggagccctactagtatgtagagaagggagtctggccaaggaaaagacacagaccttgcacaaatttatactactttttgctgtatttgatgaagggaaaagttggcactcagaaacaaagaactccttgatgcaggatagggatgctgcatctgctcgggcctggcctaaaatgcacacagtcaatggttatgtaaacaggtctctgccaggtctgattggatgccacaggaaatcagtctattggcatgtgattggaatgggcaccactcctgaagtgcactcaatattcctcgaaggtcacacatttcttgtgaggaaccatcgccaggctagcttggaaatctcgccaataactttccttactgctcaaacactcttgatggaccttggacagtttctactgttttgtcatatctcttcccaccaacatgatggcatggaagcttatgtcaaagtagacagctgtccagaggaaccccaactacgaatgaaaaataatgaagaagcggaagactatgatgatgatcttactgattctgaaatggatgtggtcaggtttgatgatgacaactctccttcctttatccaaattcgctcagttgccaagaagcatcctaaaacttgggtacattacattgctgctgaagaggaggactgggactatgctcccttagtcctcgcccccgatgacagaagttataaaagtcaatatttgaacaatggccctcagcggattggtaggaagtacaaaaaagtccgatttatggcatacacagatgaaacctttaagactcgtgaagctattcagcatgaatcaggaatcttgggacctttactttatggggaagttggagacacactgttgattatatttaagaatcaagcaagcagaccatataacatctaccctcacggaatcactgatgtccgtcctttgtattcaaggagattaccaaaaggtgtaaaacatttgaaggattttccaattctgccaggagaaatattcaaatataaatggacagtgactgtagaagatgggccaactaaatcagatcctcggtgcctgacccgctattactctagtttcgttaatatggagagagatctagcttcaggactcattggccctctcctcatctgctacaaagaatctgtagatcaaagaggaaaccagataatgtcagacaagaggaatgtcatcctgttttctgtatttgatgagaaccgaagctggtacctcacagagaatatacaacgctttctccccaatccagctggagtgcagcttgaggatccagagttccaagcctccaacatcatgcacagcatcaatggctatgtttttgatagtttgcagttgtcagtttgtttgcatgaggtggcatactggtacattctaagcattggagcacagactgacttcctttctgtcttcttctctggatataccttcaaacacaaaatggtctatgaagacacactcaccctattcccattctcaggagaaactgtcttcatgtcgatggaaaacccaggtctatggattctggggtgccacaactcagactttcggaacagaggcatgaccgccttactgaaggtttctagttgtgacaagaacactggtgattattacgaggacagttatgaagatatttcagcatacttgctgagtaaaaacaatgccattgaaccaagaagcttctctcaaaacggcgcgccaagtcccgctggaagcccaactagcaccgaagaggggacctcagagtccgccacccccgagtccggccctggctctgagcctgccactagcggctccgagactcctggcacatccgaaagcgctacacccgagagtggacccggcacctctaccgagcccagtgagggctccgcccctggaacaagcaccgagcccagcgaaggcagcgccccagggacctccacagagcccagtgaaggcagtgctcctggcaccagcaccgaaccaagcgagggctctgcacccgggacctccaccgagccaagcgaaggctctgcccctggcacttccaccgagcccagcgaaggcagcgcccctgggagccccgctggctctcccaccagcactgaggagggcacatctaccgaaccaagtgaaggctctgcaccaggtgcctcgagcccaccagtcttgaaacgccatcaagctgaaataactcgtactactcttcagtcagatcaagaggaaatcgattatgatgataccatatcagttgaaatgaagaaggaagattttgacatttatgatgaggatgaaaatcagagcccccgcagctttcaaaagaaaacacgacactattttattgctgcagtggagaggctctgggattatgggatgagtagctccccacatgttctaagaaacagggctcagagtggcagtgtccctcagttcaagaaagttgttttccaggaatttactgatggctcctttactcagcccttataccgtggagaactaaatgaacatttgggactcctggggccatatataagagcagaagttgaagataatatcatggtaactttcagaaatcaggcctctcgtccctattccttctattctagccttatttcttatgaggaagatcagaggcaaggagcagaacctagaaaaaactttgtcaagcctaatgaaaccaaaacttacttttggaaagtgcaacatcatatggcacccactaaagatgagtttgactgcaaagcctgggcttatttctctgatgttgacctggaaaaagatgtgcactcaggcctgattggaccccttctggtctgccacactaacacactgaaccctgctcatgggagacaagtgacagtacaggaatttgctctgtttttcaccatctttgatgagaccaaaagctggtacttcactgaaaatatggaaagaaactgcagggctccctgcaatatcggcgcgccatctccagccgggtccccaacttcgaccgaggaagggacctccgagtcagctaccccggagtccggtcctggcacctccaccgaaccatcggagggcagcgcccctgggagccctgccgggagccctacaagcaccgaagagggcaccagtacagagccaagtgaggggagcgcccctggtactagtactgaaccatccgaggggtcagctccaggcacgagtgagtccgctacccccgagagcggaccgggctcagagcccgccacgagtggcagtgaaactccaggctcagaacccgccactagtgggtcagagactccaggcagccctgccggatcccctacgtccaccgaggagggaacatctgagtccgcaacacccgaatccggtccaggcacctccacggaacctagtgaaggctcggcaccaggtgcctcgagccagatggaagatcccacttttaaagagaattatcgcttccatgcaatcaatggctacataatggatacactacctggcttagtaatggctcaggatcaaaggattcgatggtatctgctcagcatgggcagcaatgaaaacatccattctattcatttcagtggacatgtgttcactgtacgaaaaaaagaggagtataaaatggcactgtacaatctctatccaggtgtttttgagacagtggaaatgttaccatccaaagctggaatttggcgggtggaatgccttattggcgagcatctacatgctgggatgagcacactttttctggtgtacagcaataagtgtcagactcccctgggaatggcttctggacacattagagattttcagattacagcttcaggacaatatggacagtgggccccaaagctggccagacttcattattccggatcaatcaatgcctggagcaccaaggagcccttttcttggatcaaggtggatctgttggcaccaatgattattcacggcatcaagacccagggtgcccgtcagaagttctccagcctctacatctctcagtttatcatcatgtatagtcttgatgggaagaagtggcagacttatcgaggaaattccactggaaccttaatggtcttctttggcaatgtggattcatctgggataaaacacaatatttttaaccctccaattattgctcgatacatccgtttgcacccaactcattatagcattcgcagcactcttcgcatggagttgatgggctgtgatttaaatagttgcagcatgccattgggaatggagagtaaagcaatatcagatgcacagattactgcttcatcctactttaccaatatgtttgccacctggtctccttcaaaagctcgacttcacctccaagggaggagtaatgcctggagacctcaggtgaataatccaaaagagtggctgcaagtggacttccagaagacaatgaaagtcacaggagtaactactcagggagtaaaatctctgcttaccagcatgtatgtgaaggagttcctcatctccagcagtcaagatggccatcagtggactctcttttttcagaatggcaaagtaaaggtttttcagggaaatcaagactccttcacacctgtggtgaactctctagacccaccgttactgactcgctaccttcgaattcacccccagagttgggtgcaccagattgccctgaggatggaggttctgggctgcgaggcacaggacctctacggcgcgccaggtacctcagagtctgctacccccgagtcagggccaggatcagagccagccacctccgggtctgagacacccgggacttccgagagtgccacccctgagtccggacccgggtccgagcccgccacttccggctccgaaactcccggcacaagcgagagcgctaccccagagtcaggaccaggaacatctacagagccctctgaaggctccgctccagggtccccagccggcagtcccactagcaccgaggagggaacctctgaaagcgccacacccgaatcagggccagggtctgagcctgctaccagcggcagcgagacaccaggcacctctgagtccgccacaccagagtccggacccggatctcccgctgggagccccacctccactgaggagggatctcctgctggctctccaacatctactgaggaaggtacctcaaccgagccatccgagggatcagctcccggcacctcagagtcggcaaccccggagtctggacccggaacttccgaaagtgccacaccagagtccggtcccgggacttcagaatcagcaacacccgagtccggccctgggtctgaacccgccacaagtggtagtgagacaccaggatcagaacctgctacctcagggtcagagacacccggatctccggcaggctcaccaacctccactgaggagggcaccagcacagaaccaagcgagggctccgcacccggaacaagcactgaacccagtgagggttcagcacccggctctgagccggccacaagtggcagtgagacacccggcacttcagagagtgccacccccgagagtggcccaggcactagtaccgagccctctgaaggcagtgcgccagcctcgagcgaacaaaaactcatctcagaagaggatctgtcacctgcaaccggtcatcatcaccatcaccattga

SEQ ID NO: 1267 - protein, 2203 aa, synthetic construct
  REGION 1..2203: note = Description of Artificial Sequence: Synthetic polypeptide
ATRRYYLGAVELSWDYMQSDLGELPVDARFPPRVPKSFPFGAPGSSPSASTGTGPGSSPSASTGTGPGASPGTSSTGSPGASPGTSSTGSPGSSTPSGATGSPGSSPSASTGTGPGASPGTSSTGSPGSSPSASTGTGPGTPGSGTASSSPGSSTPSGATGSPGSSTPSGATGSPGASPGTSSTGSPASSNTSVVYKKTLFVEFTDHLFNIAKPRPPWMGLLGPTIQAEVYDTVVITLKNMASHPVSLHAVGVSYWKASEGAEYDDQTSQREKEDDKVFPGGSHTYVWQVLKENGPMASDPLCLTYSYLSHVDLVKDLNSGLIGALLVCREGSLAKEKTQTLHKFILLFAVFDEGKSWHSETKNSLMQDRDAASARAWPKMHTVNGYVNRSLPGLIGCHRKSVYWHVIGMGTTPEVHSIFLEGHTFLVRNHRQASLEISPITFLTAQTLLMDLGQFLLFCHISSHQHDGMEAYVKVDSCPEEPQLRMKNNEEAEDYDDDLTDSEMDVVRFDDDNSPSFIQIRSVAKKHPKTWVHYIAAEEEDWDYAPLVLAPDDRSYKSQYLNNGPQRIGRKYKKVRFMAYTDETFKTREAIQHESGILGPLLYGEVGDTLLIIFKNQASRPYNIYPHGITDVRPLYSRRLPKGVKHLKDFPILPGEIFKYKWTVTVEDGPTKSDPRCLTRYYSSFVNMERDLASGLIGPLLICYKESVDQRGNQIMSDKRNVILFSVFDENRSWYLTENIQRFLPNPAGVQLEDPEFQASNIMHSINGYVFDSLQLSVCLHEVAYWYILSIGAQTDFLSVFFSGYTFKHKMVYEDTLTLFPFSGETVFMSMENPGLWILGCHNSDFRNRGMTALLKVSSCDKNTGDYYEDSYEDISAYLLSKNNAIEPRSFSQNGAPSPAGSPTSTEEGTSESATPESGPGSEPATSGSETPGTSESATPESGPGTSTEPSEGSAPGTSTEPSEGSAPGTSTEPSEGSAPGTSTEPSEGSAPGTSTEPSEGSAPGTSTEPSEGSAPGSPAGSPTSTEEGTSTEPSEGSAPGASSPPVLKRHQAEITRTTLQSDQEEIDYDDTISVEMKKEDFDIYDEDENQSPRSFQKKTRHYFIAAVERLWDYGMSSSPHVLRNRAQSGSVPQFKKVVFQEFTDGSFTQPLYRGELNEHLGLLGPYIRAEVEDNIMVTFRNQASRPYSFYSSLISYEEDQRQGAEPRKNFVKPNETKTYFWKVQHHMAPTKDEFDCKAWAYFSDVDLEKDVHSGLIGPLLVCHTNTLNPAHGRQVTVQEFALFFTIFDETKSWYFTENMERNCRAPCNIGAPGTPGSGTASSSPGASPGTSSTGSPGASPGTSSTGSPGASPGTSSTGSPGSSPSASTGTGPGTPGSGTASSSPGASPGTSSTGSPGASPGTSSTGSPGASPGTSSTGSPGSSTPSGATGSPGSSTPSGATGSPGASPGTSSTGSPASSQMEDPTFKENYRFHAINGYIMDTLPGLVMAQDQRIRWYLLSMGSNENIHSIHFSGHVFTVRKKEEYKMALYNLYPGVFETVEMLPSKAGIWRVECLIGEHLHAGMSTLFLVYSNKCQTPLGMASGHIRDFQITASGQYGQWAPKLARLHYSGSINAWSTKEPFSWIKVDLLAPMIIHGIKTQGARQKFSSLYISQFIIMYSLDGKKWQTYRGNSTGTLMVFFGNVDSSGIKHNIFNPPIIARYIRLHPTHYSIRSTLRMELMGCDLNSCSMPLGMESKAISDAQITASSYFTNMFATWSPSKARLHLQGRSNAWRPQVNNPKEWLQVDFQKTMKVTGVTTQGVKSLLTSMYVKEFLISSSQDGHQWTLFFQNGKVKVFQGNQDSFTPVVNSLDPPLLTRYLRIHPQSWVHQIALRMEVLGCEAQDLYGAPGTSESATPESGPGSEPATSGSETPGTSESATPESGPGSEPATSGSETPGTSESATPESGPGTSTEPSEGSAPGSPAGSPTSTEEGTSESATPESGPGSEPATSGSETPGTSESATPESGPGSPAGSPTSTEEGSPAGSPTSTEEGTSTEPSEGSAPGTSESATPESGPGTSESATPESGPGTSESATPESGPGSEPATSGSETPGSEPATSGSETPGSPAGSPTSTEEGTSTEPSEGSAPGTSTEPSEGSAPGSEPATSGSETPGTSESATPESGPGTSTEPSEGSAPASSEQKLISEEDLSPATGHHHHHH

SEQ ID NO: 1268 - DNA, 6612 bp, synthetic construct
  misc_feature 1..6612: note = Description of Artificial Sequence: Synthetic polynucleotide
  source 1..6612: mol_type = other DNA
gccaccagaagatactacctgggtgcagtggaactgtcatgggactatatgcaaagtgatctcggtgagctgcctgtggacgcaagatttcctcctagagtgccaaaatcttttccattcggcgcgccaggctccagcccctccgcgagcacgggaaccggaccaggttcgtcaccctcagcatcaacggggacgggaccgggggcgtcaccaggaacgtcctccaccggctcgccgggtgcatcacccggaacgtcatcgaccggatcgccagggagctcgacgccatcaggcgcaacaggatcacctggctcaagccctagcgcgtcaaccggcacgggtccgggtgcctcccctggcacgtccagcaccggatcacccggatcgagcccatccgcctcaaccggaaccggacccggtacaccagggtcgggaacagcctcctcgtcaccaggctcctcaaccccctcgggagccacgggttcgcccggttcgtcaacgccttccggagcaactggtagccccggagcatcgccaggaacttcgagcacggggtcgcccgcctcgagcaacacctcagtcgtgtacaaaaagactctgtttgtagaattcacggatcaccttttcaacatcgctaagccaaggccaccctggatgggtctgctaggtcctaccatccaggctgaggtttatgatacagtggtcattacacttaagaacatggcttcccatcctgtcagtcttcatgctgttggtgtatcctactggaaagcttctgagggagctgaatatgatgatcagaccagtcaaagggagaaagaagatgataaagtcttccctggtggaagccatacatatgtctggcaggtcctgaaagagaatggtccaatggcctctgacccactgtgccttacctactcatatctttctcatgtggacctggtaaaagacttgaattcaggcctcattggagccctactagtatgtagagaagggagtctggccaaggaaaagacacagaccttgcacaaatttatactactttttgctgtatttgatgaagggaaaagttggcactcagaaacaaagaactccttgatgcaggatagggatgctgcatctgctcgggcctggcctaaaatgcacacagtcaatggttatgtaaacaggtctctgccaggtctgattggatgccacaggaaatcagtctattggcatgtgattggaatgggcaccactcctgaagtgcactcaatattcctcgaaggtcacacatttcttgtgaggaaccatcgccaggctagcttggaaatctcgccaataactttccttactgctcaaacactcttgatggaccttggacagtttctactgttttgtcatatctcttcccaccaacatgatggcatggaagcttatgtcaaagtagacagctgtccagaggaaccccaactacgaatgaaaaataatgaagaagcggaagactatgatgatgatcttactgattctgaaatggatgtggtcaggtttgatgatgacaactctccttcctttatccaaattcgctcagttgccaagaagcatcctaaaacttgggtacattacattgctgctgaagaggaggactgggactatgctcccttagtcctcgcccccgatgacagaagttataaaagtcaatatttgaacaatggccctcagcggattggtaggaagtacaaaaaagtccgatttatggcatacacagatgaaacctttaagactcgtgaagctattcagcatgaatcaggaatcttgggacctttactttatggggaagttggagacacactgttgattatatttaagaatcaagcaagcagaccatataacatctaccctcacggaatcactgatgtccgtcctttgtattcaaggagattaccaaaaggtgtaaaacatttgaaggattttccaattctgccaggagaaatattcaaatataaatggacagtgactgtagaagatgggccaactaaatcagatcctcggtgcctgacccgctattactctagtttcgttaatatggagagagatctagcttcaggactcattggccctctcctcatctgctacaaagaatctgtagatcaaagaggaaaccagataatgtcagacaagaggaatgtcatcctgttttctgtatttgatgagaaccgaagctggtacctcacagagaatatacaacgctttctccccaatccagctggagtgcagcttgaggatccagagttccaagcctccaacatcatgcacagcatcaatggctatgtttttgatagtttgcagttgtcagtttgtttgcatgaggtggcatactggtacattctaagcattggagcacagactgacttcctttctgtcttcttctctggatataccttcaaacacaaaatggtctatgaagacacactcaccctattcccattctcaggagaaactgtcttcatgtcgatggaaaacccaggtctatggattctggggtgccacaactcagactttcggaacagaggcatgaccgccttactgaaggtttctagttgtgacaagaacactggtgattattacgaggacagttatgaagatatttcagcatacttgctgagtaaaaacaatgccattgaaccaagaagcttctctcaaaacggcgcgccaagtcccgctggaagcccaactagcaccgaagaggggacctcagagtccgccacccccgagtccggccctggctctgagcctgccactagcggctccgagactcctggcacatccgaaagcgctacacccgagagtggacccggcacctctaccgagcccagtgagggctccgcccctggaacaagcaccgagcccagcgaaggcagcgccccagggacctccacagagcccagtgaaggcagtgctcctggcaccagcaccgaaccaagcgagggctctgcacccgggacctccaccgagccaagcgaaggctctgcccctggcacttccaccgagcccagcgaaggcagcgcccctgggagccccgctggctctcccaccagcactgaggagggcacatctaccgaaccaagtgaaggctctgcaccaggtgcctcgagcccaccagtcttgaaacgccatcaagctgaaataactcgtactactcttcagtcagatcaagaggaaatcgattatgatgataccatatcagttgaaatgaagaaggaagattttgacatttatgatgaggatgaaaatcagagcccccgcagctttcaaaagaaaacacgacactattttattgctgcagtggagaggctctgggattatgggatgagtagctccccacatgttctaagaaacagggctcagagtggcagtgtccctcagttcaagaaagttgttttccaggaatttactgatggctcctttactcagcccttataccgtggagaactaaatgaacatttgggactcctggggccatatataagagcagaagttgaagataatatcatggtaactttcagaaatcaggcctctcgtccctattccttctattctagccttatttcttatgaggaagatcagaggcaaggagcagaacctagaaaaaactttgtcaagcctaatgaaaccaaaacttacttttggaaagtgcaacatcatatggcacccactaaagatgagtttgactgcaaagcctgggcttatttctctgatgttgacctggaaaaagatgtgcactcaggcctgattggaccccttctggtctgccacactaacacactgaaccctgctcatgggagacaagtgacagtacaggaatttgctctgtttttcaccatctttgatgagaccaaaagctggtacttcactgaaaatatggaaagaaactgcagggctccctgcaatatcggcgcgccaggtacacccggatcgggtacagcgtcatcgagccccggtgcgtcacctggtacgtcgagcacggggtcgccaggggcgtcccctgggacgtcctcaacaggctcgcccggtgcgtcacccggcacgtcgtccacgggttcacctggtagctccccttccgcgtccactggcaccgggcctggaactccggggagcggcacagcgagctcgtcgccgggagcatcgcctgggacatcgagcaccgggtcgccaggagcatcgcccggaacatccagcacaggaagccccggcgcgtcgcccgggacatcaagcacaggttccccgggatcgagcacgccgtccggagccactggatcaccagggagctcgacaccttccggcgcaacgggatcgcccggagccagcccgggtacgtcaagcactggctcccctgcctcgagccagatggaagatcccacttttaaagagaattatcgcttccatgcaatcaatggctacataatggatacactacctggcttagtaatggctcaggatcaaaggattcgatggtatctgctcagcatgggcagcaatgaaaacatccattctattcatttcagtggacatgtgttcactgtacgaaaaaaagaggagtataaaatggcactgtacaatctctatccaggtgtttttgagacagtggaaatgttaccatccaaagctggaatttggcgggtggaatgccttattggcgagcatctacatgctgggatgagcacactttttctggtgtacagcaataagtgtcagactcccctgggaatggcttctggacacattagagattttcagattacagcttcaggacaatatggacagtgggccccaaagctggccagacttcattattccggatcaatcaatgcctggagcaccaaggagcccttttcttggatcaaggtggatctgttggcaccaatgattattcacggcatcaagacccagggtgcccgtcagaagttctccagcctctacatctctcagtttatcatcatgtatagtcttgatgggaagaagtggcagacttatcgaggaaattccactggaaccttaatggtcttctttggcaatgtggattcatctgggataaaacacaatatttttaaccctccaattattgctcgatacatccgtttgcacccaactcattatagcattcgcagcactcttcgcatggagttgatgggctgtgatttaaatagttgcagcatgccattgggaatggagagtaaagcaatatcagatgcacagattactgcttcatcctactttaccaatatgtttgccacctggtctccttcaaaagctcgacttcacctccaagggaggagtaatgcctggagacctcaggtgaataatccaaaagagtggctgcaagtggacttccagaagacaatgaaagtcacaggagtaactactcagggagtaaaatctctgcttaccagcatgtatgtgaaggagttcctcatctccagcagtcaagatggccatcagtggactctcttttttcagaatggcaaagtaaaggtttttcagggaaatcaagactccttcacacctgtggtgaactctctagacccaccgttactgactcgctaccttcgaattcacccccagagttgggtgcaccagattgccctgaggatggaggttctgggctgcgaggcacaggacctctacggcgcgccaggtacctcagagtctgctacccccgagtcagggccaggatcagagccagccacctccgggtctgagacacccgggacttccgagagtgccacccctgagtccggacccgggtccgagcccgccacttccggctccgaaactcccggcacaagcgagagcgctaccccagagtcaggaccaggaacatctacagagccctctgaaggctccgctccagggtccccagccggcagtcccactagcaccgaggagggaacctctgaaagcgccacacccgaatcagggccagggtctgagcctgctaccagcggcagcgagacaccaggcacctctgagtccgccacaccagagtccggacccggatctcccgctgggagccccacctccactgaggagggatctcctgctggctctccaacatctactgaggaaggtacctcaaccgagccatccgagggatcagctcccggcacctcagagtcggcaaccccggagtctggacccggaacttccgaaagtgccacaccagagtccggtcccgggacttcagaatcagcaacacccgagtccggccctgggtctgaacccgccacaagtggtagtgagacaccaggatcagaacctgctacctcagggtcagagacacccggatctccggcaggctcaccaacctccactgaggagggcaccagcacagaaccaagcgagggctccgcacccggaacaagcactgaacccagtgagggttcagcacccggctctgagccggccacaagtggcagtgagacacccggcacttcagagagtgccacccccgagagtggcccaggcactagtaccgagccctctgaaggcagtgcgccagcctcgagcgaacaaaaactcatctcagaagaggatctgtcacctgcaaccggtcatcatcaccatcaccattga

SEQ ID NO: 1269 - protein, 2203 aa, synthetic construct
  REGION 1..2203: note = Description of Artificial Sequence: Synthetic polypeptide
ATRRYYLGAVELSWDYMQSDLGELPVGAPGSSPSASTGTGPGSSPSASTGTGPGASPGTSSTGSPGASPGTSSTGSPGSSTPSGATGSPGSSPSASTGTGPGASPGTSSTGSPGSSPSASTGTGPGTPGSGTASSSPGSSTPSGATGSPGSSTPSGATGSPGASPGTSSTGSPASSDARFPPRVPKSFPFNTSVVYKKTLFVEFTDHLFNIAKPRPPWMGLLGPTIQAEVYDTVVITLKNMASHPVSLHAVGVSYWKASEGAEYDDQTSQREKEDDKVFPGGSHTYVWQVLKENGPMASDPLCLTYSYLSHVDLVKDLNSGLIGALLVCREGSLAKEKTQTLHKFILLFAVFDEGKSWHSETKNSLMQDRDAASARAWPKMHTVNGYVNRSLPGLIGCHRKSVYWHVIGMGTTPEVHSIFLEGHTFLVRNHRQASLEISPITFLTAQTLLMDLGQFLLFCHISSHQHDGMEAYVKVDSCPEEPQLRMKNNEEAEDYDDDLTDSEMDVVRFDDDNSPSFIQIRSVAKKHPKTWVHYIAAEEEDWDYAPLVLAPDDRSYKSQYLNNGPQRIGRKYKKVRFMAYTDETFKTREAIQHESGILGPLLYGEVGDTLLIIFKNQASRPYNIYPHGITDVRPLYSRRLPKGVKHLKDFPILPGEIFKYKWTVTVEDGPTKSDPRCLTRYYSSFVNMERDLASGLIGPLLICYKESVDQRGNQIMSDKRNVILFSVFDENRSWYLTENIQRFLPNPAGVQLEDPEFQASNIMHSINGYVFDSLQLSVCLHEVAYWYILSIGAQTDFLSVFFSGYTFKHKMVYEDTLTLFPFSGETVFMSMENPGLWILGCHNSDFRNRGMTALLKVSSCDKNTGDYYEDSYEDISAYLLSKNNAIEPRSFSQNGAPSPAGSPTSTEEGTSESATPESGPGSEPATSGSETPGTSESATPESGPGTSTEPSEGSAPGTSTEPSEGSAPGTSTEPSEGSAPGTSTEPSEGSAPGTSTEPSEGSAPGTSTEPSEGSAPGSPAGSPTSTEEGTSTEPSEGSAPGASSPPVLKRHQAEITRTTLQSDQEEIDYDDTISVEMKKEDFDIYDEDENQSPRSFQKKTRHYFIAAVERLWDYGMSSSPHVLRNRAQSGSVPQFKKVVFQEFTDGSFTQPLYRGELNEHLGLLGPYIRAEVEDNIMVTFRNQASRPYSFYSSLISYEEDQRQGAEPRKNFVKPNETKTYFWKVQHHMAPTKDEFDCKAWAYFSDVDLEKDVHSGLIGPLLVCHTNTLNPAHGRQVTVQEFALFFTIFDETKSWYFTENMERNCRAPCNIGAPGTPGSGTASSSPGASPGTSSTGSPGASPGTSSTGSPGASPGTSSTGSPGSSPSASTGTGPGTPGSGTASSSPGASPGTSSTGSPGASPGTSSTGSPGASPGTSSTGSPGSSTPSGATGSPGSSTPSGATGSPGASPGTSSTGSPASSQMEDPTFKENYRFHAINGYIMDTLPGLVMAQDQRIRWYLLSMGSNENIHSIHFSGHVFTVRKKEEYKMALYNLYPGVFETVEMLPSKAGIWRVECLIGEHLHAGMSTLFLVYSNKCQTPLGMASGHIRDFQITASGQYGQWAPKLARLHYSGSINAWSTKEPFSWIKVDLLAPMIIHGIKTQGARQKFSSLYISQFIIMYSLDGKKWQTYRGNSTGTLMVFFGNVDSSGIKHNIFNPPIIARYIRLHPTHYSIRSTLRMELMGCDLNSCSMPLGMESKAISDAQITASSYFTNMFATWSPSKARLHLQGRSNAWRPQVNNPKEWLQVDFQKTMKVTGVTTQGVKSLLTSMYVKEFLISSSQDGHQWTLFFQNGKVKVFQGNQDSFTPVVNSLDPPLLTRYLRIHPQSWVHQIALRMEVLGCEAQDLYGAPGTSESATPESGPGSEPATSGSETPGTSESATPESGPGSEPATSGSETPGTSESATPESGPGTSTEPSEGSAPGSPAGSPTSTEEGTSESATPESGPGSEPATSGSETPGTSESATPESGPGSPAGSPTSTEEGSPAGSPTSTEEGTSTEPSEGSAPGTSESATPESGPGTSESATPESGPGTSESATPESGPGSEPATSGSETPGSEPATSGSETPGSPAGSPTSTEEGTSTEPSEGSAPGTSTEPSEGSAPGSEPATSGSETPGTSESATPESGPGTSTEPSEGSAPASSEQKLISEEDLSPATGHHHHHH

SEQ ID NO: 1270 - DNA, 6612 bp, synthetic construct
  misc_feature 1..6612: note = Description of Artificial Sequence: Synthetic polynucleotide
  source 1..6612: mol_type = other DNA
gccaccagaagatactacctgggtgcagtggaactgtcatgggactatatgcaaagtgatctcggtgagctgcctgtgggcgcgccaggctccagcccctccgcgagcacgggaaccggaccaggttcgtcaccctcagcatcaacggggacgggaccgggggcgtcaccaggaacgtcctccaccggctcgccgggtgcatcacccggaacgtcatcgaccggatcgccagggagctcgacgccatcaggcgcaacaggatcacctggctcaagccctagcgcgtcaaccggcacgggtccgggtgcctcccctggcacgtccagcaccggatcacccggatcgagcccatccgcctcaaccggaaccggacccggtacaccagggtcgggaacagcctcctcgtcaccaggctcctcaaccccctcgggagccacgggttcgcccggttcgtcaacgccttccggagcaactggtagccccggagcatcgccaggaacttcgagcacggggtcgcccgcctcgagcgacgcaagatttcctcctagagtgccaaaatcttttccattcaacacctcagtcgtgtacaaaaagactctgtttgtagaattcacggatcaccttttcaacatcgctaagccaaggccaccctggatgggtctgctaggtcctaccatccaggctgaggtttatgatacagtggtcattacacttaagaacatggcttcccatcctgtcagtcttcatgctgttggtgtatcctactggaaagcttctgagggagctgaatatgatgatcagaccagtcaaagggagaaagaagatgataaagtcttccctggtggaagccatacatatgtctggcaggtcctgaaagagaatggtccaatggcctctgacccactgtgccttacctactcatatctttctcatgtggacctggtaaaagacttgaattcaggcctcattggagccctactagtatgtagagaagggagtctggccaaggaaaagacacagaccttgcacaaatttatactactttttgctgtatttgatgaagggaaaagttggcactcagaaacaaagaactccttgatgcaggatagggatgctgcatctgctcgggcctggcctaaaatgcacacagtcaatggttatgtaaacaggtctctgccaggtctgattggatgccacaggaaatcagtctattggcatgtgattggaatgggcaccactcctgaagtgcactcaatattcctcgaaggtcacacatttcttgtgaggaaccatcgccaggctagcttggaaatctcgccaataactttccttactgctcaaacactcttgatggaccttggacagtttctactgttttgtcatatctcttcccaccaacatgatggcatggaagcttatgtcaaagtagacagctgtccagaggaaccccaactacgaatgaaaaataatgaagaagcggaagactatgatgatgatcttactgattctgaaatggatgtggtcaggtttgatgatgacaactctccttcctttatccaaattcgctcagttgccaagaagcatcctaaaacttgggtacattacattgctgctgaagaggaggactgggactatgctcccttagtcctcgcccccgatgacagaagttataaaagtcaatatttgaacaatggccctcagcggattggtaggaagtacaaaaaagtccgatttatggcatacacagatgaaacctttaagactcgtgaagctattcagcatgaatcaggaatcttgggacctttactttatggggaagttggagacacactgttgattatatttaagaatcaagcaagcagaccatataacatctaccctcacggaatcactgatgtccgtcctttgtattcaaggagattaccaaaaggtgtaaaacatttgaaggattttccaattctgccaggagaaatattcaaatataaatggacagtgactgtagaagatgggccaactaaatcagatcctcggtgcctgacccgctattactctagtttcgttaatatggagagagatctagcttcaggactcattggccctctcctcatctgctacaaagaatctgtagatcaaagaggaaaccagataatgtcagacaagaggaatgtcatcctgttttctgtatttgatgagaaccgaagctggtacctcacagagaatatacaacgctttctccccaatccagctggagtgcagcttgaggatccagagttccaagcctccaacatcatgcacagcatcaatggctatgtttttgatagtttgcagttgtcagtttgtttgcatgaggtggcatactggtacattctaagcattggagcacagactgacttcctttctgtcttcttctctggatataccttcaaacacaaaatggtctatgaagacacactcaccctattcccattctcaggagaaactgtcttcatgtcgatggaaaacccaggtctatggattctggggtgccacaactcagactttcggaacagaggcatgaccgccttactgaaggtttctagttgtgacaagaacactggtgattattacgaggacagttatgaagatatttcagcatacttgctgagtaaaaacaatgccattgaaccaagaagcttctctcaaaacggcgcgccaagtcccgctggaagcccaactagcaccgaagaggggacctcagagtccgccacccccgagtccggccctggctctgagcctgccactagcggctccgagactcctggcacatccgaaagcgctacacccgagagtggacccggcacctctaccgagcccagtgagggctccgcccctggaacaagcaccgagcccagcgaaggcagcgccccagggacctccacagagcccagtgaaggcagtgctcctggcaccagcaccgaaccaagcgagggctctgcacccgggacctccaccgagccaagcgaaggctctgcccctggcacttccaccgagcccagcgaaggcagcgcccctgggagccccgctggctctcccaccagcactgaggagggcacatctaccgaaccaagtgaaggctctgcaccaggtgcctcgagcccaccagtcttgaaacgccatcaagctgaaataactcgtactactcttcagtcagatcaagaggaaatcgattatgatgataccatatcagttgaaatgaagaaggaagattttgacatttatgatgaggatgaaaatcagagcccccgcagctttcaaaagaaaacacgacactattttattgctgcagtggagaggctctgggattatgggatgagtagctccccacatgttctaagaaacagggctcagagtggcagtgtccctcagttcaagaaagttgttttccaggaatttactgatggctcctttactcagcccttataccgtggagaactaaatgaacatttgggactcctggggccatatataagagcagaagttgaagataatatcatggtaactttcagaaatcaggcctctcgtccctattccttctattctagccttatttcttatgaggaagatcagaggcaaggagcagaacctagaaaaaactttgtcaagcctaatgaaaccaaaacttacttttggaaagtgcaacatcatatggcacccactaaagatgagtttgactgcaaagcctgggcttatttctctgatgttgacctggaaaaagatgtgcactcaggcctgattggaccccttctggtctgccacactaacacactgaaccctgctcatgggagacaagtgacagtacaggaatttgctctgtttttcaccatctttgatgagaccaaaagctggtacttcactgaaaatatggaaagaaactgcagggctccctgcaatatcggcgcgccaggtacacccggatcgggtacagcgtcatcgagccccggtgcgtcacctggtacgtcgagcacggggtcgccaggggcgtcccctgggacgtcctcaacaggctcgcccggtgcgtcacccggcacgtcgtccacgggttcacctggtagctccccttccgcgtccactggcaccgggcctggaactccggggagcggcacagcgagctcgtcgccgggagcatcgcctgggacatcgagcaccgggtcgccaggagcatcgcccggaacatccagcacaggaagccccggcgcgtcgcccgggacatcaagcacaggttccccgggatcgagcacgccgtccggagccactggatcaccagggagctcgacaccttccggcgcaacgggatcgcccggagccagcccgggtacgtcaagcactggctcccctgcctcgagccagatggaagatcccacttttaaagagaattatcgcttccatgcaatcaatggctacataatggatacactacctggcttagtaatggctcaggatcaaaggattcgatggtatctgctcagcatgggcagcaatgaaaacatccattctattcatttcagtggacatgtgttcactgtacgaaaaaaagaggagtataaaatggcactgtacaatctctatccaggtgtttttgagacagtggaaatgttaccatccaaagctggaatttggcgggtggaatgccttattggcgagcatctacatgctgggatgagcacactttttctggtgtacagcaataagtgtcagactcccctgggaatggcttctggacacattagagattttcagattacagcttcaggacaatatggacagtgggccccaaagctggccagacttcattattccggatcaatcaatgcctggagcaccaaggagcccttttcttggatcaaggtggatctgttggcaccaatgattattcacggcatcaagacccagggtgcccgtcagaagttctccagcctctacatctctcagtttatcatcatgtatagtcttgatgggaagaagtggcagacttatcgaggaaattccactggaaccttaatggtcttctttggcaatgtggattcatctgggataaaacacaatatttttaaccctccaattattgctcgatacatccgtttgcacccaactcattatagcattcgcagcactcttcgcatggagttgatgggctgtgatttaaatagttgcagcatgccattgggaatggagagtaaagcaatatcagatgcacagattactgcttcatcctactttaccaatatgtttgccacctggtctccttcaaaagctcgacttcacctccaagggaggagtaatgcctggagacctcaggtgaataatccaaaagagtggctgcaagtggacttccagaagacaatgaaagtcacaggagtaactactcagggagtaaaatctctgcttaccagcatgtatgtgaaggagttcctcatctccagcagtcaagatggccatcagtggactctcttttttcagaatggcaaagtaaaggtttttcagggaaatcaagactccttcacacctgtggtgaactctctagacccaccgttactgactcgctaccttcgaattcacccccagagttgggtgcaccagattgccctgaggatggaggttctgggctgcgaggcacaggacctctacggcgcgccaggtacctcagagtctgctacccccgagtcagggccaggatcagagccagccacctccgggtctgagacacccgggacttccgagagtgccacccctgagtccggacccgggtccgagcccgccacttccggctccgaaactcccggcacaagcgagagcgctaccccagagtcaggaccaggaacatctacagagccctctgaaggctccgctccagggtccccagccggcagtcccactagcaccgaggagggaacctctgaaagcgccacacccgaatcagggccagggtctgagcctgctaccagcggcagcgagacaccaggcacctctgagtccgccacaccagagtccggacccggatctcccgctgggagccccacctccactgaggagggatctcctgctggctctccaacatctactgaggaaggtacctcaaccgagccatccgagggatcagctcccggcacctcagagtcggcaaccccggagtctggacccggaacttccgaaagtgccacaccagagtccggtcccgggacttcagaatcagcaacacccgagtccggccctgggtctgaacccgccacaagtggtagtgagacaccaggatcagaacctgctacctcagggtcagagacacccggatctccggcaggctcaccaacctccactgaggagggcaccagcacagaaccaagcgagggctccgcacccggaacaagcactgaacccagtgagggttcagcacccggctctgagccggccacaagtggcagtgagacacccggcacttcagagagtgccacccccgagagtggcccaggcactagtaccgagccctctgaaggcagtgcgccagcctcgagcgaacaaaaactcatctcagaagaggatctgtcacctgcaaccggtcatcatcaccatcaccattga

SEQ ID NO: 1271 - protein, 2203 aa, synthetic construct
  REGION 1..2203: note = Description of Artificial Sequence: Synthetic polypeptide
ATRRYYLGAVELSWDYMQGAPGSSPSASTGTGPGSSPSASTGTGPGASPGTSSTGSPGASPGTSSTGSPGSSTPSGATGSPGSSPSASTGTGPGASPGTSSTGSPGSSPSASTGTGPGTPGSGTASSSPGSSTPSGATGSPGSSTPSGATGSPGASPGTSSTGSPASSSDLGELPVDARFPPRVPKSFPFNTSVVYKKTLFVEFTDHLFNIAKPRPPWMGLLGPTIQAEVYDTVVITLKNMASHPVSLHAVGVSYWKASEGAEYDDQTSQREKEDDKVFPGGSHTYVWQVLKENGPMASDPLCLTYSYLSHVDLVKDLNSGLIGALLVCREGSLAKEKTQTLHKFILLFAVFDEGKSWHSETKNSLMQDRDAASARAWPKMHTVNGYVNRSLPGLIGCHRKSVYWHVIGMGTTPEVHSIFLEGHTFLVRNHRQASLEISPITFLTAQTLLMDLGQFLLFCHISSHQHDGMEAYVKVDSCPEEPQLRMKNNEEAEDYDDDLTDSEMDVVRFDDDNSPSFIQIRSVAKKHPKTWVHYIAAEEEDWDYAPLVLAPDDRSYKSQYLNNGPQRIGRKYKKVRFMAYTDETFKTREAIQHESGILGPLLYGEVGDTLLIIFKNQASRPYNIYPHGITDVRPLYSRRLPKGVKHLKDFPILPGEIFKYKWTVTVEDGPTKSDPRCLTRYYSSFVNMERDLASGLIGPLLICYKESVDQRGNQIMSDKRNVILFSVFDENRSWYLTENIQRFLPNPAGVQLEDPEFQASNIMHSINGYVFDSLQLSVCLHEVAYWYILSIGAQTDFLSVFFSGYTFKHKMVYEDTLTLFPFSGETVFMSMENPGLWILGCHNSDFRNRGMTALLKVSSCDKNTGDYYEDSYEDISAYLLSKNNAIEPRSFSQNGAPSPAGSPTSTEEGTSESATPESGPGSEPATSGSETPGTSESATPESGPGTSTEPSEGSAPGTSTEPSEGSAPGTSTEPSEGSAPGTSTEPSEGSAPGTSTEPSEGSAPGTSTEPSEGSAPGSPAGSPTSTEEGTSTEPSEGSAPGASSPPVLKRHQAEITRTTLQSDQEEIDYDDTISVEMKKEDFDIYDEDENQSPRSFQKKTRHYFIAAVERLWDYGMSSSPHVLRNRAQSGSVPQFKKVVFQEFTDGSFTQPLYRGELNEHLGLLGPYIRAEVEDNIMVTFRNQASRPYSFYSSLISYEEDQRQGAEPRKNFVKPNETKTYFWKVQHHMAPTKDEFDCKAWAYFSDVDLEKDVHSGLIGPLLVCHTNTLNPAHGRQVTVQEFALFFTIFDETKSWYFTENMERNCRAPCNIGAPGTPGSGTASSSPGASPGTSSTGSPGASPGTSSTGSPGASPGTSSTGSPGSSPSASTGTGPGTPGSGTASSSPGASPGTSSTGSPGASPGTSSTGSPGASPGTSSTGSPGSSTPSGATGSPGSSTPSGATGSPGASPGTSSTGSPASSQMEDPTFKENYRFHAINGYIMDTLPGLVMAQDQRIRWYLLSMGSNENIHSIHFSGHVFTVRKKEEYKMALYNLYPGVFETVEMLPSKAGIWRVECLIGEHLHAGMSTLFLVYSNKCQTPLGMASGHIRDFQITASGQYGQWAPKLARLHYSGSINAWSTKEPFSWIKVDLLAPMIIHGIKTQGARQKFSSLYISQFIIMYSLDGKKWQTYRGNSTGTLMVFFGNVDSSGIKHNIFNPPIIARYIRLHPTHYSIRSTLRMELMGCDLNSCSMPLGMESKAISDAQITASSYFTNMFATWSPSKARLHLQGRSNAWRPQVNNPKEWLQVDFQKTMKVTGVTTQGVKSLLTSMYVKEFLISSSQDGHQWTLFFQNGKVKVFQGNQDSFTPVVNSLDPPLLTRYLRIHPQSWVHQIALRMEVLGCEAQDLYGAPGTSESATPESGPGSEPATSGSETPGTSESATPESGPGSEPATSGSETPGTSESATPESGPGTSTEPSEGSAPGSPAGSPTSTEEGTSESATPESGPGSEPATSGSETPGTSESATPESGPGSPAGSPTSTEEGSPAGSPTSTEEGTSTEPSEGSAPGTSESATPESGPGTSESATPESGPGTSESATPESGPGSEPATSGSETPGSEPATSGSETPGSPAGSPTSTEEGTSTEPSEGSAPGTSTEPSEGSAPGSEPATSGSETPGTSESATPESGPGTSTEPSEGSAPASSEQKLISEEDLSPATGHHHHHH

SEQ ID NO: 1272 - DNA, 6612 bp, synthetic construct
  misc_feature 1..6612: note = Description of Artificial Sequence: Synthetic polynucleotide
  source 1..6612: mol_type = other DNA
gccaccagaagatactacctgggtgcagtggaactgtcatgggactatatgcaaggcgcgccaggctccagcccctccgcgagcacgggaaccggaccaggttcgtcaccctcagcatcaacggggacgggaccgggggcgtcaccaggaacgtcctccaccggctcgccgggtgcatcacccggaacgtcatcgaccggatcgccagggagctcgacgccatcaggcgcaacaggatcacctggctcaagccctagcgcgtcaaccggcacgggtccgggtgcctcccctggcacgtccagcaccggatcacccggatcgagcccatccgcctcaaccggaaccggacccggtacaccagggtcgggaacagcctcctcgtcaccaggctcctcaaccccctcgggagccacgggttcgcccggttcgtcaacgccttccggagcaactggtagccccggagcatcgccaggaacttcgagcacggggtcgcccgcctcgagcagtgatctcggtgagctgcctgtggacgcaagatttcctcctagagtgccaaaatcttttccattcaacacctcagtcgtgtacaaaaagactctgtttgtagaattcacggatcaccttttcaacatcgctaagccaaggccaccctggatgggtctgctaggtcctaccatccaggctgaggtttatgatacagtggtcattacacttaagaacatggcttcccatcctgtcagtcttcatgctgttggtgtatcctactggaaagcttctgagggagctgaatatgatgatcagaccagtcaaagggagaaagaagatgataaagtcttccctggtggaagccatacatatgtctggcaggtcctgaaagagaatggtccaatggcctctgacccactgtgccttacctactcatatctttctcatgtggacctggtaaaagacttgaattcaggcctcattggagccctactagtatgtagagaagggagtctggccaaggaaaagacacagaccttgcacaaatttatactactttttgctgtatttgatgaagggaaaagttggcactcagaaacaaagaactccttgatgcaggatagggatgctgcatctgctcgggcctggcctaaaatgcacacagtcaatggttatgtaaacaggtctctgccaggtctgattggatgccacaggaaatcagtctattggcatgtgattggaatgggcaccactcctgaagtgcactcaatattcctcgaaggtcacacatttcttgtgaggaaccatcgccaggctagcttggaaatctcgccaataactttccttactgctcaaacactcttgatggaccttggacagtttctactgttttgtcatatctcttcccaccaacatgatggcatggaagcttatgtcaaagtagacagctgtccagaggaaccccaactacgaatgaaaaataatgaagaagcggaagactatgatgatgatcttactgattctgaaatggatgtggtcaggtttgatgatgacaactctccttcctttatccaaattcgctcagttgccaagaagcatcctaaaacttgggtacattacattgctgctgaagaggaggactgggactatgctcccttagtcctcgcccccgatgacagaagttataaaagtcaatatttgaacaatggccctcagcggattggtaggaagtacaaaaaagtccgatttatggcatacacagatgaaacctttaagactcgtgaagctattcagcatgaatcaggaatcttgggacctttactttatggggaagttggagacacactgttgattatatttaagaatcaagcaagcagaccatataacatctaccctcacggaatcactgatgtccgtcctttgtattcaaggagattaccaaaaggtgtaaaacatttgaaggattttccaattctgccaggagaaatattcaaatataaatggacagtgactgtagaagatgggccaactaaatcagatcctcggtgcctgacccgctattactctagtttcgttaatatggagagagatctagcttcaggactcattggccctctcctcatctgctacaaagaatctgtagatcaaagaggaaaccagataatgtcagacaagaggaatgtcatcctgttttctgtatttgatgagaaccgaagctggtacctcacagagaatatacaacgctttctccccaatccagctggagtgcagcttgaggatccagagttccaagcctccaacatcatgcacagcatcaatggctatgtttttgatagtttgcagttgtcagtttgtttgcatgaggtggcatactggtacattctaagcattggagcacagactgacttcctttctgtcttcttctctggatataccttcaaacacaaaatggtctatgaagacacactcaccctattcccattctcaggagaaactgtcttcatgtcgatggaaaacccaggtctatggattctggggtgccacaactcagactttcggaacagaggcatgaccgccttactgaaggtttctagttgtgacaagaacactggtgattattacgaggacagttatgaagatatttcagcatacttgctgagtaaaaacaatgccattgaaccaagaagcttctctcaaaacggcgcgccaagtcccgctggaagcccaactagcaccgaagaggggacctcagagtccgccacccccgagtccggccctggctctgagcctgccactagcggctccgagactcctggcacatccgaaagcgctacacccgagagtggacccggcacctctaccgagcccagtgagggctccgcccctggaacaagcaccgagcccagcgaaggcagcgccccagggacctccacagagcccagtgaaggcagtgctcctggcaccagcaccgaaccaagcgagggctctgcacccgggacctccaccgagccaagcgaaggctctgcccctggcacttccaccgagcccagcgaaggcagcgcccctgggagccccgctggctctcccaccagcactgaggagggcacatctaccgaaccaagtgaaggctctgcaccaggtgcctcgagcccaccagtcttgaaacgccatcaagctgaaataactcgtactactcttcagtcagatcaagaggaaatcgattatgatgataccatatcagttgaaatgaagaaggaagattttgacatttatgatgaggatgaaaatcagagcccccgcagctttcaaaagaaaacacgacactattttattgctgcagtggagaggctctgggattatgggatgagtagctccccacatgttctaagaaacagggctcagagtggcagtgtccctcagttcaagaaagttgttttccaggaatttactgatggctcctttactcagcccttataccgtggagaactaaatgaacatttgggactcctggggccatatataagagcagaagttgaagataatatcatggtaactttcagaaatcaggcctctcgtccctattccttctattctagccttatttcttatgaggaagatcagaggcaaggagcagaacctagaaaaaactttgtcaagcctaatgaaaccaaaacttacttttggaaagtgcaacatcatatggcacccactaaagatgagtttgactgcaaagcctgggcttatttctctgatgttgacctggaaaaagatgtgcactcaggcctgattggaccccttctggtctgccacactaacacactgaaccctgctcatgggagacaagtgacagtacaggaatttgctctgtttttcaccatctttgatgagaccaaaagctggtacttcactgaaaatatggaaagaaactgcagggctccctgcaatatcggcgcgccaggtacacccggatcgggtacagcgtcatcgagccccggtgcgtcacctggtacgtcgagcacggggtcgccaggggcgtcccctgggacgtcctcaacaggctcgcccggtgcgtcacccggcacgtcgtccacgggttcacctggtagctccccttccgcgtccactggcaccgggcctggaactccggggagcggcacagcgagctcgtcgccgggagcatcgcctgggacatcgagcaccgggtcgccaggagcatcgcccggaacatccagcacaggaagccccggcgcgtcgcccgggacatcaagcacaggttccccgggatcgagcacgccgtccggagccactggatcaccagggagctcgacaccttccggcgcaacgggatcgcccggagccagcccgggtacgtcaagcactggctcccctgcctcgagccagatggaagatcccacttttaaagagaattatcgcttccatgcaatcaatggctacataatggatacactacctggcttagtaatggctcaggatcaaaggattcgatggtatctgctcagcatgggcagcaatgaaaacatccattctattcatttcagtggacatgtgttcactgtacgaaaaaaagaggagtataaaatggcactgtacaatctctatccaggtgtttttgagacagtggaaatgttaccatccaaagctggaatttggcgggtggaatgccttattggcgagcatctacatgctgggatgagcacactttttctggtgtacagcaataagtgtcagactcccctgggaatggcttctggacacattagagattttcagattacagcttcaggacaatatggacagtgggccccaaagctggccagacttcattattccggatcaatcaatgcctggagcaccaaggagcccttttcttggatcaaggtggatctgttggcaccaatgattattcacggcatcaagacccagggtgcccgtcagaagttctccagcctctacatctctcagtttatcatcatgtatagtcttgatgggaagaagtggcagacttatcgaggaaattccactggaaccttaatggtcttctttggcaatgtggattcatctgggataaaacacaatatttttaaccctccaattattgctcgatacatccgtttgcacccaactcattatagcattcgcagcactcttcgcatggagttgatgggctgtgatttaaatagttgcagcatgccattgggaatggagagtaaagcaatatcagatgcacagattactgcttcatcctactttaccaatatgtttgccacctggtctccttcaaaagctcgacttcacctccaagggaggagtaatgcctggagacctcaggtgaataatccaaaagagtggctgcaagtggacttccagaagacaatgaaagtcacaggagtaactactcagggagtaaaatctctgcttaccagcatgtatgtgaaggagttcctcatctccagcagtcaagatggccatcagtggactctcttttttcagaatggcaaagtaaaggtttttcagggaaatcaagactccttcacacctgtggtgaactctctagacccaccgttactgactcgctaccttcgaattcacccccagagttgggtgcaccagattgccctgaggatggaggttctgggctgcgaggcacaggacctctacggcgcgccaggtacctcagagtctgctacccccgagtcagggccaggatcagagccagccacctccgggtctgagacacccgggacttccgagagtgccacccctgagtccggacccgggtccgagcccgccacttccggctccgaaactcccggcacaagcgagagcgctaccccagagtcaggaccaggaacatctacagagccctctgaaggctccgctccagggtccccagccggcagtcccactagcaccgaggagggaacctctgaaagcgccacacccgaatcagggccagggtctgagcctgctaccagcggcagcgagacaccaggcacctctgagtccgccacaccagagtccggacccggatctcccgctgggagccccacctccactgaggagggatctcctgctggctctccaacatctactgaggaaggtacctcaaccgagccatccgagggatcagctcccggcacctcagagtcggcaaccccggagtctggacccggaacttccgaaagtgccacaccagagtccggtcccgggacttcagaatcagcaacacccgagtccggccctgggtctgaacccgccacaagtggtagtgagacaccaggatcagaacctgctacctcagggtcagagacacccggatctccggcaggctcaccaacctccactgaggagggcaccagcacagaaccaagcgagggctccgcacccggaacaagcactgaacccagtgagggttcagcacccggctctgagccggccacaagtggcagtgagacacccggcacttcagagagtgccacccccgagagtggcccaggcactagtaccgagccctctgaaggcagtgcgccagcctcgagcgaacaaaaactcatctcagaagaggatctgtcacctgcaaccggtcatcatcaccatcaccattga

SEQ ID NO: 1273 - protein, 2203 aa, synthetic construct
  REGION 1..2203: note = Description of Artificial Sequence: Synthetic polypeptide
ATRRYYLGAVELSWDYMQGAPTSESATPESGPGSEPATSGSETPGTSESATPESGPGSEPATSGSETPGTSESATPESGPGTSTEPSEGSAPGSPAGSPTSTEEGTSESATPESGPGSEPATSGSETPGTSESATPESGPGSPAGSPTSTEEGSPAGSPTSTEEGASSSDLGELPVDARFPPRVPKSFPFNTSVVYKKTLFVEFTDHLFNIAKPRPPWMGLLGPTIQAEVYDTVVITLKNMASHPVSLHAVGVSYWKASEGAEYDDQTSQREKEDDKVFPGGSHTYVWQVLKENGPMASDPLCLTYSYLSHVDLVKDLNSGLIGALLVCREGSLAKEKTQTLHKFILLFAVFDEGKSWHSETKNSLMQDRDAASARAWPKMHTVNGYVNRSLPGLIGCHRKSVYWHVIGMGTTPEVHSIFLEGHTFLVRNHRQASLEISPITFLTAQTLLMDLGQFLLFCHISSHQHDGMEAYVKVDSCPEEPQLRMKNNEEAEDYDDDLTDSEMDVVRFDDDNSPSFIQIRSVAKKHPKTWVHYIAAEEEDWDYAPLVLAPDDRSYKSQYLNNGPQRIGRKYKKVRFMAYTDETFKTREAIQHESGILGPLLYGEVGDTLLIIFKNQASRPYNIYPHGITDVRPLYSRRLPKGVKHLKDFPILPGEIFKYKWTVTVEDGPTKSDPRCLTRYYSSFVNMERDLASGLIGPLLICYKESVDQRGNQIMSDKRNVILFSVFDENRSWYLTENIQRFLPNPAGVQLEDPEFQASNIMHSINGYVFDSLQLSVCLHEVAYWYILSIGAQTDFLSVFFSGYTFKHKMVYEDTLTLFPFSGETVFMSMENPGLWILGCHNSDFRNRGMTALLKVSSCDKNTGDYYEDSYEDISAYLLSKNNAIEPRSFSQNGAPSPAGSPTSTEEGTSESATPESGPGSEPATSGSETPGTSESATPESGPGTSTEPSEGSAPGTSTEPSEGSAPGTSTEPSEGSAPGTSTEPSEGSAPGTSTEPSEGSAPGTSTEPSEGSAPGSPAGSPTSTEEGTSTEPSEGSAPGASSPPVLKRHQAEITRTTLQSDQEEIDYDDTISVEMKKEDFDIYDEDENQSPRSFQKKTRHYFIAAVERLWDYGMSSSPHVLRNRAQSGSVPQFKKVVFQEFTDGSFTQPLYRGELNEHLGLLGPYIRAEVEDNIMVTFRNQASRPYSFYSSLISYEEDQRQGAEPRKNFVKPNETKTYFWKVQHHMAPTKDEFDCKAWAYFSDVDLEKDVHSGLIGPLLVCHTNTLNPAHGRQVTVQEFALFFTIFDETKSWYFTENMERNCRAPCNIGAPGTPGSGTASSSPGASPGTSSTGSPGASPGTSSTGSPGASPGTSSTGSPGSSPSASTGTGPGTPGSGTASSSPGASPGTSSTGSPGASPGTSSTGSPGASPGTSSTGSPGSSTPSGATGSPGSSTPSGATGSPGASPGTSSTGSPASSQMEDPTFKENYRFHAINGYIMDTLPGLVMAQDQRIRWYLLSMGSNENIHSIHFSGHVFTVRKKEEYKMALYNLYPGVFETVEMLPSKAGIWRVECLIGEHLHAGMSTLFLVYSNKCQTPLGMASGHIRDFQITASGQYGQWAPKLARLHYSGSINAWSTKEPFSWIKVDLLAPMIIHGIKTQGARQKFSSLYISQFIIMYSLDGKKWQTYRGNSTGTLMVFFGNVDSSGIKHNIFNPPIIARYIRLHPTHYSIRSTLRMELMGCDLNSCSMPLGMESKAISDAQITASSYFTNMFATWSPSKARLHLQGRSNAWRPQVNNPKEWLQVDFQKTMKVTGVTTQGVKSLLTSMYVKEFLISSSQDGHQWTLFFQNGKVKVFQGNQDSFTPVVNSLDPPLLTRYLRIHPQSWVHQIALRMEVLGCEAQDLYGAPGTSESATPESGPGSEPATSGSETPGTSESATPESGPGSEPATSGSETPGTSESATPESGPGTSTEPSEGSAPGSPAGSPTSTEEGTSESATPESGPGSEPATSGSETPGTSESATPESGPGSPAGSPTSTEEGSPAGSPTSTEEGTSTEPSEGSAPGTSESATPESGPGTSESATPESGPGTSESATPESGPGSEPATSGSETPGSEPATSGSETPGSPAGSPTSTEEGTSTEPSEGSAPGTSTEPSEGSAPGSEPATSGSETPGTSESATPESGPGTSTEPSEGSAPASSEQKLISEEDLSPATGHHHHHH

SEQ ID NO: 1274 - DNA, 6612 bp, synthetic construct
  misc_feature 1..6612: note = Description of Artificial Sequence: Synthetic polynucleotide
  source 1..6612: mol_type = other DNA
gccaccagaagatactacctgggtgcagtggaactgtcatgggactatatgcaaggcgcgccaacatcagagagcgccacccctgaaagtggtcccgggagcgagccagccacatctgggtcggaaacgccaggcacaagtgagtctgcaactcccgagtccggacctggctccgagcctgccactagcggctccgagactccgggaacttccgagagcgctacaccagaaagcggacccggaaccagtaccgaacctagcgagggctctgctccgggcagcccagccggctctcctacatccacggaggagggcacttccgaatccgccaccccggagtcagggccaggatctgaacccgctacctcaggcagtgagacgccaggaacgagcgagtccgctacaccggagagtgggccagggagccctgctggatctcctacgtccactgaggaagggtcaccagcgggctcgcccaccagcactgaagaaggtgcctcgagcagtgatctcggtgagctgcctgtggacgcaagatttcctcctagagtgccaaaatcttttccattcaacacctcagtcgtgtacaaaaagactctgtttgtagaattcacggatcaccttttcaacatcgctaagccaaggccaccctggatgggtctgctaggtcctaccatccaggctgaggtttatgatacagtggtcattacacttaagaacatggcttcccatcctgtcagtcttcatgctgttggtgtatcctactggaaagcttctgagggagctgaatatgatgatcagaccagtcaaagggagaaagaagatgataaagtcttccctggtggaagccatacatatgtctggcaggtcctgaaagagaatggtccaatggcctctgacccactgtgccttacctactcatatctttctcatgtggacctggtaaaagacttgaattcaggcctcattggagccctactagtatgtagagaagggagtctggccaaggaaaagacacagaccttgcacaaatttatactactttttgctgtatttgatgaagggaaaagttggcactcagaaacaaagaactccttgatgcaggatagggatgctgcatctgctcgggcctggcctaaaatgcacacagtcaatggttatgtaaacaggtctctgccaggtctgattggatgccacaggaaatcagtctattggcatgtgattggaatgggcaccactcctgaagtgcactcaatattcctcgaaggtcacacatttcttgtgaggaaccatcgccaggctagcttggaaatctcgccaataactttccttactgctcaaacactcttgatggaccttggacagtttctactgttttgtcatatctcttcccaccaacatgatggcatggaagcttatgtcaaagtagacagctgtccagaggaaccccaactacgaatgaaaaataatgaagaagcggaagactatgatgatgatcttactgattctgaaatggatgtggtcaggtttgatgatgacaactctccttcctttatccaaattcgctcagttgccaagaagcatcctaaaacttgggtacattacattgctgctgaagaggaggactgggactatgctcccttagtcctcgcccccgatgacagaagttataaaagtcaatatttgaacaatggccctcagcggattggtaggaagtacaaaaaagtccgatttatggcatacacagatgaaacctttaagactcgtgaagctattcagcatgaatcaggaatcttgggacctttactttatggggaagttggagacacactgttgattatatttaagaatcaagcaagcagaccatataacatctaccctcacggaatcactgatgtccgtcctttgtattcaaggagattaccaaaaggtgtaaaacatttgaaggattttccaattctgccaggagaaatattcaaatataaatggacagtgactgtagaagatgggccaactaaatcagatcctcggtgcctgacccgctattactctagtttcgttaatatggagagagatctagcttcaggactcattggccctctcctcatctgctacaaagaatctgtagatcaaagaggaaaccagataatgtcagacaagaggaatgtcatcctgttttctgtatttgatgagaaccgaagctggtacctcacagagaatatacaacgctttctccccaatccagctggagtgcagcttgaggatccagagttccaagcctccaacatcatgcacagcatcaatggctatgtttttgatagtttgcagttgtcagtttgtttgcatgaggtggcatactggtacattctaagcattggagcacagactgacttcctttctgtcttcttctctggatataccttcaaacacaaaatggtctatgaagacacactcaccctattcccattctcaggagaaactgtcttcatgtcgatggaaaacccaggtctatggattctggggtgccacaactcagactttcggaacagaggcatgaccgccttactgaaggtttctagttgtgacaagaacactggtgattattacgaggacagttatgaagatatttcagcatacttgctgagtaaaaacaatgccattgaaccaagaagcttctctcaaaacggcgcgccaagtcccgctggaagcccaactagcaccgaagaggggacctcagagtccgccacccccgagtccggccctggctctgagcctgccactagcggctccgagactcctggcacatccgaaagcgctacacccgagagtggacccggcacctctaccgagcccagtgagggctccgcccctggaacaagcaccgagcccagcgaaggcagcgccccagggacctccacagagcccagtgaaggcagtgctcctggcaccagcaccgaaccaagcgagggctctgcacccgggacctccaccgagccaagcgaaggctctgcccctggcacttccaccgagcccagcgaaggcagcgcccctgggagccccgctggctctcccaccagcactgaggagggcacatctaccgaaccaagtgaaggctctgcaccaggtgcctcgagcccaccagtcttgaaacgccatcaagctgaaataactcgtactactcttcagtcagatcaagaggaaatcgattatgatgataccatatcagttgaaatgaagaaggaagattttgacatttatgatgaggatgaaaatcagagcccccgcagctttcaaaagaaaacacgacactattttattgctgcagtggagaggctctgggattatgggatgagtagctccccacatgttctaagaaacagggctcagagtggcagtgtccctcagttcaagaaagttgttttccaggaatttactgatggctcctttactcagcccttataccgtggagaactaaatgaacatttgggactcctggggccatatataagagcagaagttgaagataatatcatggtaactttcagaaatcaggcctctcgtccctattccttctattctagccttatttcttatgaggaagatcagaggcaaggagcagaacctagaaaaaactttgtcaagcctaatgaaaccaaaacttacttttggaaagtgcaacatcatatggcacccactaaagatgagtttgactgcaaagcctgggcttatttctctgatgttgacctggaaaaagatgtgcactcaggcctgattggaccccttctggtctgccacactaacacactgaaccctgctcatgggagacaagtgacagtacaggaatttgctctgtttttcaccatctttgatgagaccaaaagctggtacttcactgaaaatatggaaagaaactgcagggctccctgcaatatcggcgcgccaggtacacccggatcgggtacagcgtcatcgagccccggtgcgtcacctggtacgtcgagcacggggtcgccaggggcgtcccctgggacgtcctcaacaggctcgcccggtgcgtcacccggcacgtcgtccacgggttcacctggtagctccccttccgcgtccactggcaccgggcctggaactccggggagcggcacagcgagctcgtcgccgggagcatcgcctgggacatcgagcaccgggtcgccaggagcatcgcccggaacatccagcacaggaagccccggcgcgtcgcccgggacatcaagcacaggttccccgggatcgagcacgccgtccggagccactggatcaccagggagctcgacaccttccggcgcaacgggatcgcccggagccagcccgggtacgtcaagcactggctcccctgcctcgagccagatggaagatcccacttttaaagagaattatcgcttccatgcaatcaatggctacataatggatacactacctggcttagtaatggctcaggatcaaaggattcgatggtatctgctcagcatgggcagcaatgaaaacatccattctattcatttcagtggacatgtgttcactgtacgaaaaaaagaggagtataaaatggcactgtacaatctctatccaggtgtttttgagacagtggaaatgttaccatccaaagctggaatttggcgggtggaatgccttattggcgagcatctacatgctgggatgagcacactttttctggtgtacagcaataagtgtcagactcccctgggaatggcttctggacacattagagattttcagattacagcttcaggacaatatggacagtgggccccaaagctggccagacttcattattccggatcaatcaatgcctggagcaccaaggagcccttttcttggatcaaggtggatctgttggcaccaatgattattcacggcatcaagacccagggtgcccgtcagaagttctccagcctctacatctctcagtttatcatcatgtatagtcttgatgggaagaagtggcagacttatcgaggaaattccactggaaccttaatggtcttctttggcaatgtggattcatctgggataaaacacaatatttttaaccctccaattattgctcgatacatccgtttgcacccaactcattatagcattcgcagcactcttcgcatggagttgatgggctgtgatttaaatagttgcagcatgccattgggaatggagagtaaagcaatatcagatgcacagattactgcttcatcctactttaccaatatgtttgccacctggtctccttcaaaagctcgacttcacctccaagggaggagtaatgcctggagacctcaggtgaataatccaaaagagtggctgcaagtggacttccagaagacaatgaaagtcacaggagtaactactcagggagtaaaatctctgcttaccagcatgtatgtgaaggagttcctcatctccagcagtcaagatggccatcagtggactctcttttttcagaatggcaaagtaaaggtttttcagggaaatcaagactccttcacacctgtggtgaactctctagacccaccgttactgactcgctaccttcgaattcacccccagagttgggtgcaccagattgccctgaggatggaggttctgggctgcgaggcacaggacctctacggcgcgccaggtacctcagagtctgctacccccgagtcagggccaggatcagagccagccacctccgggtctgagacacccgggacttccgagagtgccacccctgagtccggacccgggtccgagcccgccacttccggctccgaaactcccggcacaagcgagagcgctaccccagagtcaggaccaggaacatctacagagccctctgaaggctccgctccagggtccccagccggcagtcccactagcaccgaggagggaacctctgaaagcgccacacccgaatcagggccagggtctgagcctgctaccagcggcagcgagacaccaggcacctctgagtccgccacaccagagtccggacccggatctcccgctgggagccccacctccactgaggagggatctcctgctggctctccaacatctactgaggaaggtacctcaaccgagccatccgagggatcagctcccggcacctcagagtcggcaaccccggagtctggacccggaacttccgaaagtgccacaccagagtccggtcccgggacttcagaatcagcaacacccgagtccggccctgggtctgaacccgccacaagtggtagtgagacaccaggatcagaacctgctacctcagggtcagagacacccggatctccggcaggctcaccaacctccactgaggagggcaccagcacagaaccaagcgagggctccgcacccggaacaagcactgaacccagtgagggttcagcacccggctctgagccggccacaagtggcagtgagacacccggcacttcagagagtgccacccccgagagtggcccaggcactagtaccgagccctctgaaggcagtgcgccagcctcgagcgaacaaaaactcatctcagaagaggatctgtcacctgcaaccggtcatcatcaccatcaccattga

SEQ ID NO: 1275 - protein, 2203 aa, synthetic construct
  REGION 1..2203: note = Description of Artificial Sequence: Synthetic polypeptide
ATRRYYLGAVELSWDYMQGAPGSSPSASTGTGPGSSPSASTGTGPGASPGTSSTGSPGASPGTSSTGSPGSSTPSGATGSPGSSPSASTGTGPGASPGTSSTGSPGSSPSASTGTGPGTPGSGTASSSPGSSTPSGATGSPGSSTPSGATGSPGASPGTSSTGSPASSSDLGELPVDARFPPRVPKSFPFNTSVVYKKTLFVEFTDHLFNIAKPRPPWMGLLGPTIQAEVYDTVVITLKNMASHPVSLHAVGVSYWKASEGAEYDDQTSQREKEDDKVFPGGSHTYVWQVLKENGPMASDPLCLTYSYLSHVDLVKDLNSGLIGALLVCREGSLAKEKTQTLHKFILLFAVFDEGKSWHSETKNSLMQDRDAASARAWPKMHTVNGYVNRSLPGLIGCHRKSVYWHVIGMGTTPEVHSIFLEGHTFLVRNHRQASLEISPITFLTAQTLLMDLGQFLLFCHISSHQHDGMEAYVKVDSCPEEPQLRMKNNEEAEDYDDDLTDSEMDVVRFDDDNSPSFIQIRSVAKKHPKTWVHYIAAEEEDWDYAPLVLAPDDRSYKSQYLNNGPQRIGRKYKKVRFMAYTDETFKTREAIQHESGILGPLLYGEVGDTLLIIFKNQASRPYNIYPHGITDVRPLYSRRLPKGVKHLKDFPILPGEIFKYKWTVTVEDGPTKSDPRCLTRYYSSFVNMERDLASGLIGPLLICYKESVDQRGNQIMSDKRNVILFSVFDENRSWYLTENIQRFLPNPAGVQLEDPEFQASNIMHSINGYVFDSLQLSVCLHEVAYWYILSIGAQTDFLSVFFSGYTFKHKMVYEDTLTLFPFSGETVFMSMENPGLWILGCHNSDFRNRGMTALLKVSSCDKNTGDYYEDSYEDISAYLLSKNNAIEPRSFSQNGAPSPAGSPTSTEEGTSESATPESGPGSEPATSGSETPGTSESATPESGPGTSTEPSEGSAPGTSTEPSEGSAPGTSTEPSEGSAPGTSTEPSEGSAPGTSTEPSEGSAPGTSTEPSEGSAPGSPAGSPTSTEEGTSTEPSEGSAPGASSPPVLKRHQAEITRTTLQSDQEEIDYDDTISVEMKKEDFDIYDEDENQSPRSFQKKTRHYFIAAVERLWDYGMSSSPHVLRNRAQSGSVPQFKKVVFQEFTDGSFTQPLYRGELNEHLGLLGPYIRAEVEDNIMVTFRNQASRPYSFYSSLISYEEDQRQGAEPRKNFVKPNETKTYFWKVQHHMAPTKDEFDCKAWAYFSDVDLEKDVHSGLIGPLLVCHTNTLNPAHGRQVTVQEFALFFTIFDETKSWYFTENMERNCRAPCNIQMEDPGAPSPAGSPTSTEEGTSESATPESGPGTSTEPSEGSAPGSPAGSPTSTEEGTSTEPSEGSAPGTSTEPSEGSAPGTSESATPESGPGSEPATSGSETPGSEPATSGSETPGSPAGSPTSTEEGTSESATPESGPGTSTEPSEGSAPGASSTFKENYRFHAINGYIMDTLPGLVMAQDQRIRWYLLSMGSNENIHSIHFSGHVFTVRKKEEYKMALYNLYPGVFETVEMLPSKAGIWRVECLIGEHLHAGMSTLFLVYSNKCQTPLGMASGHIRDFQITASGQYGQWAPKLARLHYSGSINAWSTKEPFSWIKVDLLAPMIIHGIKTQGARQKFSSLYISQFIIMYSLDGKKWQTYRGNSTGTLMVFFGNVDSSGIKHNIFNPPIIARYIRLHPTHYSIRSTLRMELMGCDLNSCSMPLGMESKAISDAQITASSYFTNMFATWSPSKARLHLQGRSNAWRPQVNNPKEWLQVDFQKTMKVTGVTTQGVKSLLTSMYVKEFLISSSQDGHQWTLFFQNGKVKVFQGNQDSFTPVVNSLDPPLLTRYLRIHPQSWVHQIALRMEVLGCEAQDLYGAPGTSESATPESGPGSEPATSGSETPGTSESATPESGPGSEPATSGSETPGTSESATPESGPGTSTEPSEGSAPGSPAGSPTSTEEGTSESATPESGPGSEPATSGSETPGTSESATPESGPGSPAGSPTSTEEGSPAGSPTSTEEGTSTEPSEGSAPGTSESATPESGPGTSESATPESGPGTSESATPESGPGSEPATSGSETPGSEPATSGSETPGSPAGSPTSTEEGTSTEPSEGSAPGTSTEPSEGSAPGSEPATSGSETPGTSESATPESGPGTSTEPSEGSAPASSEQKLISEEDLSPATGHHHHHH

SEQ ID NO: 1276 - DNA, 6612 bp, synthetic construct
  misc_feature 1..6612: note = Description of Artificial Sequence: Synthetic polynucleotide
  source 1..6612: mol_type = other DNA
gccaccagaagatactacctgggtgcagtggaactgtcatgggactatatgcaaggcgcgccaggctccagcccctccgcgagcacgggaaccggaccaggttcgtcaccctcagcatcaacggggacgggaccgggggcgtcaccaggaacgtcctccaccggctcgccgggtgcatcacccggaacgtcatcgaccggatcgccagggagctcgacgccatcaggcgcaacaggatcacctggctcaagccctagcgcgtcaaccggcacgggtccgggtgcctcccctggcacgtccagcaccggatcacccggatcgagcccatccgcctcaaccggaaccggacccggtacaccagggtcgggaacagcctcctcgtcaccaggctcctcaaccccctcgggagccacgggttcgcccggttcgtcaacgccttccggagcaactggtagccccggagcatcgccaggaacttcgagcacggggtcgcccgcctcgagcagtgatctcggtgagctgcctgtggacgcaagatttcctcctagagtgccaaaatcttttccattcaacacctcagtcgtgtacaaaaagactctgtttgtagaattcacggatcaccttttcaacatcgctaagccaaggccaccctggatgggtctgctaggtcctaccatccaggctgaggtttatgatacagtggtcattacacttaagaacatggcttcccatcctgtcagtcttcatgctgttggtgtatcctactggaaagcttctgagggagctgaatatgatgatcagaccagtcaaagggagaaagaagatgataaagtcttccctggtggaagccatacatatgtctggcaggtcctgaaagagaatggtccaatggcctctgacccactgtgccttacctactcatatctttctcatgtggacctggtaaaagacttgaattcaggcctcattggagccctactagtatgtagagaagggagtctggccaaggaaaagacacagaccttgcacaaatttatactactttttgctgtatttgatgaagggaaaagttggcactcagaaacaaagaactccttgatgcaggatagggatgctgcatctgctcgggcctggcctaaaatgcacacagtcaatggttatgtaaacaggtctctgccaggtctgattggatgccacaggaaatcagtctattggcatgtgattggaatgggcaccactcctgaagtgcactcaatattcctcgaaggtcacacatttcttgtgaggaaccatcgccaggctagcttggaaatctcgccaataactttccttactgctcaaacactcttgatggaccttggacagtttctactgttttgtcatatctcttcccaccaacatgatggcatggaagcttatgtcaaagtagacagctgtccagaggaaccccaactacgaatgaaaaataatgaagaagcggaagactatgatgatgatcttactgattctgaaatggatgtggtcaggtttgatgatgacaactctccttcctttatccaaattcgctcagttgccaagaagcatcctaaaacttgggtacattacattgctgctgaagaggaggactgggactatgctcccttagtcctcgcccccgatgacagaagttataaaagtcaatatttgaacaatggccctcagcggattggtaggaagtacaaaaaagtccgatttatggcatacacagatgaaacctttaagactcgtgaagctattcagcatgaatcaggaatcttgggacctttactttatggggaagttggagacacactgttgattatatttaagaatcaagcaagcagaccatataacatctaccctcacggaatcactgatgtccgtcctttgtattcaaggagattaccaaaaggtgtaaaacatttgaaggattttccaattctgccaggagaaatattcaaatataaatggacagtgactgtagaagatgggccaactaaatcagatcctcggtgcctgacccgctattactctagtttcgttaatatggagagagatctagcttcaggactcattggccctctcctcatctgctacaaagaatctgtagatcaaagaggaaaccagataatgtcagacaagaggaatgtcatcctgttttctgtatttgatgagaaccgaagctggtacctcacagagaatatacaacgctttctccccaatccagctggagtgcagcttgaggatccagagttccaagcctccaacatcatgcacagcatcaatggctatgtttttgatagtttgcagttgtcagtttgtttgcatgaggtggcatactggtacattctaagcattggagcacagactgacttcctttctgtcttcttctctggatataccttcaaacacaaaatggtctatgaagacacactcaccctattcccattctcaggagaaactgtcttcatgtcgatggaaaacccaggtctatggattctggggtgccacaactcagactttcggaacagaggcatgaccgccttactgaaggtttctagttgtgacaagaacactggtgattattacgaggacagttatgaagatatttcagcatacttgctgagtaaaaacaatgccattgaaccaagaagcttctctcaaaacggcgcgccaagtcccgctggaagcccaactagcaccgaagaggggacctcagagtccgccacccccgagtccggccctggctctgagcctgccactagcggctccgagactcctggcacatccgaaagcgctacacccgagagtggacccggcacctctaccgagcccagtgagggctccgcccctggaacaagcaccgagcccagcgaaggcagcgccccagggacctccacagagcccagtgaaggcagtgctcctggcaccagcaccgaaccaagcgagggctctgcacccgggacctccaccgagccaagcgaaggctctgcccctggcacttccaccgagcccagcgaaggcagcgcccctgggagccccgctggctctcccaccagcactgaggagggcacatctaccgaaccaagtgaaggctctgcaccaggtgcctcgagcccaccagtcttgaaacgccatcaagctgaaataactcgtactactcttcagtcagatcaagaggaaatcgattatgatgataccatatcagttgaaatgaagaaggaagattttgacatttatgatgaggatgaaaatcagagcccccgcagctttcaaaagaaaacacgacactattttattgctgcagtggagaggctctgggattatgggatgagtagctccccacatgttctaagaaacagggctcagagtggcagtgtccctcagttcaagaaagttgttttccaggaatttactgatggctcctttactcagcccttataccgtggagaactaaatgaacatttgggactcctggggccatatataagagcagaagttgaagataatatcatggtaactttcagaaatcaggcctctcgtccctattccttctattctagccttatttcttatgaggaagatcagaggcaaggagcagaacctagaaaaaactttgtcaagcctaatgaaaccaaaacttacttttggaaagtgcaacatcatatggcacccactaaagatgagtttgactgcaaagcctgggcttatttctctgatgttgacctggaaaaagatgtgcactcaggcctgattggaccccttctggtctgccacactaacacactgaaccctgctcatgggagacaagtgacagtacaggaatttgctctgtttttcaccatctttgatgagaccaaaagctggtacttcactgaaaatatggaaagaaactgcagggctccctgcaatatccagatggaagatcccggcgcgccatctccagccgggtccccaacttcgaccgaggaagggacctccgagtcagctaccccggagtccggtcctggcacctccaccgaaccatcggagggcagcgcccctgggagccctgccgggagccctacaagcaccgaagagggcaccagtacagagccaagtgaggggagcgcccctggtactagtactgaaccatccgaggggtcagctccaggcacgagtgagtccgctacccccgagagcggaccgggctcagagcccgccacgagtggcagtgaaactccaggctcagaacccgccactagtgggtcagagactccaggcagccctgccggatcccctacgtccaccgaggagggaacatctgagtccgcaacacccgaatccggtccaggcacctccacggaacctagtgaaggctcggcaccaggtgcctcgagcacttttaaagagaattatcgcttccatgcaatcaatggctacataatggatacactacctggcttagtaatggctcaggatcaaaggattcgatggtatctgctcagcatgggcagcaatgaaaacatccattctattcatttcagtggacatgtgttcactgtacgaaaaaaagaggagtataaaatggcactgtacaatctctatccaggtgtttttgagacagtggaaatgttaccatccaaagctggaatttggcgggtggaatgccttattggcgagcatctacatgctgggatgagcacactttttctggtgtacagcaataagtgtcagactcccctgggaatggcttctggacacattagagattttcagattacagcttcaggacaatatggacagtgggccccaaagctggccagacttcattattccggatcaatcaatgcctggagcaccaaggagcccttttcttggatcaaggtggatctgttggcaccaatgattattcacggcatcaagacccagggtgcccgtcagaagttctccagcctctacatctctcagtttatcatcatgtatagtcttgatgggaagaagtggcagacttatcgaggaaattccactggaaccttaatggtcttctttggcaatgtggattcatctgggataaaacacaatatttttaaccctccaattattgctcgatacatccgtttgcacccaactcattatagcattcgcagcactcttcgcatggagttgatgggctgtgatttaaatagttgcagcatgccattgggaatggagagtaaagcaatatcagatgcacagattactgcttcatcctactttaccaatatgtttgccacctggtctccttcaaaagctcgacttcacctccaagggaggagtaatgcctggagacctcaggtgaataatccaaaagagtggctgcaagtggacttccagaagacaatgaaagtcacaggagtaactactcagggagtaaaatctctgcttaccagcatgtatgtgaaggagttcctcatctccagcagtcaagatggccatcagtggactctcttttttcagaatggcaaagtaaaggtttttcagggaaatcaagactccttcacacctgtggtgaactctctagacccaccgttactgactcgctaccttcgaattcacccccagagttgggtgcaccagattgccctgaggatggaggttctgggctgcgaggcacaggacctctacggcgcgccaggtacctcagagtctgctacccccgagtcagggccaggatcagagccagccacctccgggtctgagacacccgggacttccgagagtgccacccctgagtccggacccgggtccgagcccgccacttccggctccgaaactcccggcacaagcgagagcgctaccccagagtcaggaccaggaacatctacagagccctctgaaggctccgctccagggtccccagccggcagtcccactagcaccgaggagggaacctctgaaagcgccacacccgaatcagggccagggtctgagcctgctaccagcggcagcgagacaccaggcacctctgagtccgccacaccagagtccggacccggatctcccgctgggagccccacctccactgaggagggatctcctgctggctctccaacatctactgaggaaggtacctcaaccgagccatccgagggatcagctcccggcacctcagagtcggcaaccccggagtctggacccggaacttccgaaagtgccacaccagagtccggtcccgggacttcagaatcagcaacacccgagtccggccctgggtctgaacccgccacaagtggtagtgagacaccaggatcagaacctgctacctcagggtcagagacacccggatctccggcaggctcaccaacctccactgaggagggcaccagcacagaaccaagcgagggctccgcacccggaacaagcactgaacccagtgagggttcagcacccggctctgagccggccacaagtggcagtgagacacccggcacttcagagagtgccacccccgagagtggcccaggcactagtaccgagccctctgaaggcagtgcgccagcctcgagcgaacaaaaactcatctcagaagaggatctgtcacctgcaaccggtcatcatcaccatcaccattga

SEQ ID NO: 1277 - protein, 2203 aa, synthetic construct
  REGION 1..2203: note = Description of Artificial Sequence: Synthetic polypeptide
ATRRYYLGAVELSWDYMQGAPTSESATPESGPGSEPATSGSETPGTSESATPESGPGSEPATSGSETPGTSESATPESGPGTSTEPSEGSAPGSPAGSPTSTEEGTSESATPESGPGSEPATSGSETPGTSESATPESGPGSPAGSPTSTEEGSPAGSPTSTEEGASSSDLGELPVDARFPPRVPKSFPFNTSVVYKKTLFVEFTDHLFNIAKPRPPWMGLLGPTIQAEVYDTVVITLKNMASHPVSLHAVGVSYWKASEGAEYDDQTSQREKEDDKVFPGGSHTYVWQVLKENGPMASDPLCLTYSYLSHVDLVKDLNSGLIGALLVCREGSLAKEKTQTLHKFILLFAVFDEGKSWHSETKNSLMQDRDAASARAWPKMHTVNGYVNRSLPGLIGCHRKSVYWHVIGMGTTPEVHSIFLEGHTFLVRNHRQASLEISPITFLTAQTLLMDLGQFLLFCHISSHQHDGMEAYVKVDSCPEEPQLRMKNNEEAEDYDDDLTDSEMDVVRFDDDNSPSFIQIRSVAKKHPKTWVHYIAAEEEDWDYAPLVLAPDDRSYKSQYLNNGPQRIGRKYKKVRFMAYTDETFKTREAIQHESGILGPLLYGEVGDTLLIIFKNQASRPYNIYPHGITDVRPLYSRRLPKGVKHLKDFPILPGEIFKYKWTVTVEDGPTKSDPRCLTRYYSSFVNMERDLASGLIGPLLICYKESVDQRGNQIMSDKRNVILFSVFDENRSWYLTENIQRFLPNPAGVQLEDPEFQASNIMHSINGYVFDSLQLSVCLHEVAYWYILSIGAQTDFLSVFFSGYTFKHKMVYEDTLTLFPFSGETVFMSMENPGLWILGCHNSDFRNRGMTALLKVSSCDKNTGDYYEDSYEDISAYLLSKNNAIEPRSFSQNGAPSPAGSPTSTEEGTSESATPESGPGSEPATSGSETPGTSESATPESGPGTSTEPSEGSAPGTSTEPSEGSAPGTSTEPSEGSAPGTSTEPSEGSAPGTSTEPSEGSAPGTSTEPSEGSAPGSPAGSPTSTEEGTSTEPSEGSAPGASSPPVLKRHQAEITRTTLQSDQEEIDYDDTISVEMKKEDFDIYDEDENQSPRSFQKKTRHYFIAAVERLWDYGMSSSPHVLRNRAQSGSVPQFKKVVFQEFTDGSFTQPLYRGELNEHLGLLGPYIRAEVEDNIMVTFRNQASRPYSFYSSLISYEEDQRQGAEPRKNFVKPNETKTYFWKVQHHMAPTKDEFDCKAWAYFSDVDLEKDVHSGLIGPLLVCHTNTLNPAHGRQVTVQEFALFFTIFDETKSWYFTENMERNCRAPCNIQMEDPGAPSPAGSPTSTEEGTSESATPESGPGTSTEPSEGSAPGSPAGSPTSTEEGTSTEPSEGSAPGTSTEPSEGSAPGTSESATPESGPGSEPATSGSETPGSEPATSGSETPGSPAGSPTSTEEGTSESATPESGPGTSTEPSEGSAPGASSTFKENYRFHAINGYIMDTLPGLVMAQDQRIRWYLLSMGSNENIHSIHFSGHVFTVRKKEEYKMALYNLYPGVFETVEMLPSKAGIWRVECLIGEHLHAGMSTLFLVYSNKCQTPLGMASGHIRDFQITASGQYGQWAPKLARLHYSGSINAWSTKEPFSWIKVDLLAPMIIHGIKTQGARQKFSSLYISQFIIMYSLDGKKWQTYRGNSTGTLMVFFGNVDSSGIKHNIFNPPIIARYIRLHPTHYSIRSTLRMELMGCDLNSCSMPLGMESKAISDAQITASSYFTNMFATWSPSKARLHLQGRSNAWRPQVNNPKEWLQVDFQKTMKVTGVTTQGVKSLLTSMYVKEFLISSSQDGHQWTLFFQNGKVKVFQGNQDSFTPVVNSLDPPLLTRYLRIHPQSWVHQIALRMEVLGCEAQDLYGAPGTSESATPESGPGSEPATSGSETPGTSESATPESGPGSEPATSGSETPGTSESATPESGPGTSTEPSEGSAPGSPAGSPTSTEEGTSESATPESGPGSEPATSGSETPGTSESATPESGPGSPAGSPTSTEEGSPAGSPTSTEEGTSTEPSEGSAPGTSESATPESGPGTSESATPESGPGTSESATPESGPGSEPATSGSETPGSEPATSGSETPGSPAGSPTSTEEGTSTEPSEGSAPGTSTEPSEGSAPGSEPATSGSETPGTSESATPESGPGTSTEPSEGSAPASSEQKLISEEDLSPATGHHHHHH

SEQ ID NO: 1278 - DNA, 6612 bp, synthetic construct
  misc_feature 1..6612: note = Description of Artificial Sequence: Synthetic polynucleotide
  source 1..6612: mol_type = other DNA
gccaccagaagatactacctgggtgcagtggaactgtcatgggactatatgcaaggcgcgccaacatcagagagcgccacccctgaaagtggtcccgggagcgagccagccacatctgggtcggaaacgccaggcacaagtgagtctgcaactcccgagtccggacctggctccgagcctgccactagcggctccgagactccgggaacttccgagagcgctacaccagaaagcggacccggaaccagtaccgaacctagcgagggctctgctccgggcagcccagccggctctcctacatccacggaggagggcacttccgaatccgccaccccggagtcagggccaggatctgaacccgctacctcaggcagtgagacgccaggaacgagcgagtccgctacaccggagagtgggccagggagccctgctggatctcctacgtccactgaggaagggtcaccagcgggctcgcccaccagcactgaagaaggtgcctcgagcagtgatctcggtgagctgcctgtggacgcaagatttcctcctagagtgccaaaatcttttccattcaacacctcagtcgtgtacaaaaagactctgtttgtagaattcacggatcaccttttcaacatcgctaagccaaggccaccctggatgggtctgctaggtcctaccatccaggctgaggtttatgatacagtggtcattacacttaagaacatggcttcccatcctgtcagtcttcatgctgttggtgtatcctactggaaagcttctgagggagctgaatatgatgatcagaccagtcaaagggagaaagaagatgataaagtcttccctggtggaagccatacatatgtctggcaggtcctgaaagagaatggtccaatggcctctgacccactgtgccttacctactcatatctttctcatgtggacctggtaaaagacttgaattcaggcctcattggagccctactagtatgtagagaagggagtctggccaaggaaaagacacagaccttgcacaaatttatactactttttgctgtatttgatgaagggaaaagttggcactcagaaacaaagaactccttgatgcaggatagggatgctgcatctgctcgggcctggcctaaaatgcacacagtcaatggttatgtaaacaggtctctgccaggtctgattggatgccacaggaaatcagtctattggcatgtgattggaatgggcaccactcctgaagtgcactcaatattcctcgaaggtcacacatttcttgtgaggaaccatcgccaggctagcttggaaatctcgccaataactttccttactgctcaaacactcttgatggaccttggacagtttctactgttttgtcatatctcttcccaccaacatgatggcatggaagcttatgtcaaagtagacagctgtccagaggaaccccaactacgaatgaaaaataatgaagaagcggaagactatgatgatgatcttactgattctgaaatggatgtggtcaggtttgatgatgacaactctccttcctttatccaaattcgctcagttgccaagaagcatcctaaaacttgggtacattacattgctgctgaagaggaggactgggactatgctcccttagtcctcgcccccgatgacagaagttataaaagtcaatatttgaacaatggccctcagcggattggtaggaagtacaaaaaagtccgatttatggcatacacagatgaaacctttaagactcgtgaagctattcagcatgaatcaggaatcttgggacctttactttatggggaagttggagacacactgttgattatatttaagaatcaagcaagcagaccatataacatctaccctcacggaatcactgatgtccgtcctttgtattcaaggagattaccaaaaggtgtaaaacatttgaaggattttccaattctgccaggagaaatattcaaatataaatggacagtgactgtagaagatgggccaactaaatcagatcctcggtgcctgacccgctattactctagtttcgttaatatggagagagatctagcttcaggactcattggccctctcctcatctgctacaaagaatctgtagatcaaagaggaaaccagataatgtcagacaagaggaatgtcatcctgttttctgtatttgatgagaaccgaagctggtacctcacagagaatatacaacgctttctccccaatccagctggagtgcagcttgaggatccagagttccaagcctccaacatcatgcacagcatcaatggctatgtttttgatagtttgcagttgtcagtttgtttgcatgaggtggcatactggtacattctaagcattggagcacagactgacttcctttctgtcttcttctctggatataccttcaaacacaaaatggtctatgaagacacactcaccctattcccattctcaggagaaactgtcttcatgtcgatggaaaacccaggtctatggattctggggtgccacaactcagactttcggaacagaggcatgaccgccttactgaaggtttctagttgtgacaagaacactggtgattattacgaggacagttatgaagatatttcagcatacttgctgagtaaaaacaatgccattgaaccaagaagcttctctcaaaacggcgcgccaagtcccgctggaagcccaactagcaccgaagaggggacctcagagtccgccacccccgagtccggccctggctctgagcctgccactagcggctccgagactcctggcacatccgaaagcgctacacccgagagtggacccggcacctctaccgagcccagtgagggctccgcccctggaacaagcaccgagcccagcgaaggcagcgccccagggacctccacagagcccagtgaaggcagtgctcctggcaccagcaccgaaccaagcgagggctctgcacccgggacctccaccgagccaagcgaaggctctgcccctggcacttccaccgagcccagcgaaggcagcgcccctgggagccccgctggctctcccaccagcactgaggagggcacatctaccgaaccaagtgaaggctctgcaccaggtgcctcgagcccaccagtcttgaaacgccatcaagctgaaataactcgtactactcttcagtcagatcaagaggaaatcgattatgatgataccatatcagttgaaatgaagaaggaagattttgacatttatgatgaggatgaaaatcagagcccccgcagctttcaaaagaaaacacgacactattttattgctgcagtggagaggctctgggattatgggatgagtagctccccacatgttctaagaaacagggctcagagtggcagtgtccctcagttcaagaaagttgttttccaggaatttactgatggctcctttactcagcccttataccgtggagaactaaatgaacatttgggactcctggggccatatataagagcagaagttgaagataatatcatggtaactttcagaaatcaggcctctcgtccctattccttctattctagccttatttcttatgaggaagatcagaggcaaggagcagaacctagaaaaaactttgtcaagcctaatgaaaccaaaacttacttttggaaagtgcaacatcatatggcacccactaaagatgagtttgactgcaaagcctgggcttatttctctgatgttgacctggaaaaagatgtgcactcaggcctgattggaccccttctggtctgccacactaacacactgaaccctgctcatgggagacaagtgacagtacaggaatttgctctgtttttcaccatctttgatgagaccaaaagctggtacttcactgaaaatatggaaagaaactgcagggctccctgcaatatccagatggaagatcccggcgcgccatctccagccgggtccccaacttcgaccgaggaagggacctccgagtcagctaccccggagtccggtcctggcacctccaccgaaccatcggagggcagcgcccctgggagccctgccgggagccctacaagcaccgaagagggcaccagtacagagccaagtgaggggagcgcccctggtactagtactgaaccatccgaggggtcagctccaggcacgagtgagtccgctacccccgagagcggaccgggctcagagcccgccacgagtggcagtgaaactccaggctcagaacccgccactagtgggtcagagactccaggcagccctgccggatcccctacgtccaccgaggagggaacatctgagtccgcaacacccgaatccggtccaggcacctccacggaacctagtgaaggctcggcaccaggtgcctcgagcacttttaaagagaattatcgcttccatgcaatcaatggctacataatggatacactacctggcttagtaatggctcaggatcaaaggattcgatggtatctgctcagcatgggcagcaatgaaaacatccattctattcatttcagtggacatgtgttcactgtacgaaaaaaagaggagtataaaatggcactgtacaatctctatccaggtgtttttgagacagtggaaatgttaccatccaaagctggaatttggcgggtggaatgccttattggcgagcatctacatgctgggatgagcacactttttctggtgtacagcaataagtgtcagactcccctgggaatggcttctggacacattagagattttcagattacagcttcaggacaatatggacagtgggccccaaagctggccagacttcattattccggatcaatcaatgcctggagcaccaaggagcccttttcttggatcaaggtggatctgttggcaccaatgattattcacggcatcaagacccagggtgcccgtcagaagttctccagcctctacatctctcagtttatcatcatgtatagtcttgatgggaagaagtggcagacttatcgaggaaattccactggaaccttaatggtcttctttggcaatgtggattcatctgggataaaacacaatatttttaaccctccaattattgctcgatacatccgtttgcacccaactcattatagcattcgcagcactcttcgcatggagttgatgggctgtgatttaaatagttgcagcatgccattgggaatggagagtaaagcaatatcagatgcacagattactgcttcatcctactttaccaatatgtttgccacctggtctccttcaaaagctcgacttcacctccaagggaggagtaatgcctggagacctcaggtgaataatccaaaagagtggctgcaagtggacttccagaagacaatgaaagtcacaggagtaactactcagggagtaaaatctctgcttaccagcatgtatgtgaaggagttcctcatctccagcagtcaagatggccatcagtggactctcttttttcagaatggcaaagtaaaggtttttcagggaaatcaagactccttcacacctgtggtgaactctctagacccaccgttactgactcgctaccttcgaattcacccccagagttgggtgcaccagattgccctgaggatggaggttctgggctgcgaggcacaggacctctacggcgcgccaggtacctcagagtctgctacccccgagtcagggccaggatcagagccagccacctccgggtctgagacacccgggacttccgagagtgccacccctgagtccggacccgggtccgagcccgccacttccggctccgaaactcccggcacaagcgagagcgctaccccagagtcaggaccaggaacatctacagagccctctgaaggctccgctccagggtccccagccggcagtcccactagcaccgaggagggaacctctgaaagcgccacacccgaatcagggccagggtctgagcctgctaccagcggcagcgagacaccaggcacctctgagtccgccacaccagagtccggacccggatctcccgctgggagccccacctccactgaggagggatctcctgctggctctccaacatctactgaggaaggtacctcaaccgagccatccgagggatcagctcccggcacctcagagtcggcaaccccggagtctggacccggaacttccgaaagtgccacaccagagtccggtcccgggacttcagaatcagcaacacccgagtccggccctgggtctgaacccgccacaagtggtagtgagacaccaggatcagaacctgctacctcagggtcagagacacccggatctccggcaggctcaccaacctccactgaggagggcaccagcacagaaccaagcgagggctccgcacccggaacaagcactgaacccagtgagggttcagcacccggctctgagccggccacaagtggcagtgagacacccggcacttcagagagtgccacccccgagagtggcccaggcactagtaccgagccctctgaaggcagtgcgccagcctcgagcgaacaaaaactcatctcagaagaggatctgtcacctgcaaccggtcatcatcaccatcaccattga

SEQ ID NO: 1279 - protein, 2203 aa, synthetic construct
  REGION 1..2203: note = Description of Artificial Sequence: Synthetic polypeptide
ATRRYYLGAVELSWDYMQSDLGELPVDARFPPRVPKSFPFGAPGSSPSASTGTGPGSSPSASTGTGPGASPGTSSTGSPGASPGTSSTGSPGSSTPSGATGSPGSSPSASTGTGPGASPGTSSTGSPGSSPSASTGTGPGTPGSGTASSSPGSSTPSGATGSPGSSTPSGATGSPGASPGTSSTGSPASSNTSVVYKKTLFVEFTDHLFNIAKPRPPWMGLLGPTIQAEVYDTVVITLKNMASHPVSLHAVGVSYWKASEGAEYDDQTSQREKEDDKVFPGGSHTYVWQVLKENGPMASDPLCLTYSYLSHVDLVKDLNSGLIGALLVCREGSLAKEKTQTLHKFILLFAVFDEGKSWHSETKNSLMQDRDAASARAWPKMHTVNGYVNRSLPGLIGCHRKSVYWHVIGMGTTPEVHSIFLEGHTFLVRNHRQASLEISPITFLTAQTLLMDLGQFLLFCHISSHQHDGMEAYVKVDSCPEEPQLRMKNNEEAEDYDDDLTDSEMDVVRFDDDNSPSFIQIRSVAKKHPKTWVHYIAAEEEDWDYAPLVLAPDDRSYKSQYLNNGPQRIGRKYKKVRFMAYTDETFKTREAIQHESGILGPLLYGEVGDTLLIIFKNQASRPYNIYPHGITDVRPLYSRRLPKGVKHLKDFPILPGEIFKYKWTVTVEDGPTKSDPRCLTRYYSSFVNMERDLASGLIGPLLICYKESVDQRGNQIMSDKRNVILFSVFDENRSWYLTENIQRFLPNPAGVQLEDPEFQASNIMHSINGYVFDSLQLSVCLHEVAYWYILSIGAQTDFLSVFFSGYTFKHKMVYEDTLTLFPFSGETVFMSMENPGLWILGCHNSDFRNRGMTALLKVSSCDKNTGDYYEDSYEDISAYLLSKNNAIEPRSFSQNGAPSPAGSPTSTEEGTSESATPESGPGSEPATSGSETPGTSESATPESGPGTSTEPSEGSAPGTSTEPSEGSAPGTSTEPSEGSAPGTSTEPSEGSAPGTSTEPSEGSAPGTSTEPSEGSAPGSPAGSPTSTEEGTSTEPSEGSAPGASSPPVLKRHQAEITRTTLQSDQEEIDYDDTISVEMKKEDFDIYDEDENQSPRSFQKKTRHYFIAAVERLWDYGMSSSPHVLRNRAQSGSVPQFKKVVFQEFTDGSFTQPLYRGELNEHLGLLGPYIRAEVEDNIMVTFRNQASRPYSFYSSLISYEEDQRQGAEPRKNFVKPNETKTYFWKVQHHMAPTKDEFDCKAWAYFSDVDLEKDVHSGLIGPLLVCHTNTLNPAHGRQVTVQEFALFFTIFDETKSWYFTENMERNCRAPCNIQMEDPGAPSPAGSPTSTEEGTSESATPESGPGTSTEPSEGSAPGSPAGSPTSTEEGTSTEPSEGSAPGTSTEPSEGSAPGTSESATPESGPGSEPATSGSETPGSEPATSGSETPGSPAGSPTSTEEGTSESATPESGPGTSTEPSEGSAPGASSTFKENYRFHAINGYIMDTLPGLVMAQDQRIRWYLLSMGSNENIHSIHFSGHVFTVRKKEEYKMALYNLYPGVFETVEMLPSKAGIWRVECLIGEHLHAGMSTLFLVYSNKCQTPLGMASGHIRDFQITASGQYGQWAPKLARLHYSGSINAWSTKEPFSWIKVDLLAPMIIHGIKTQGARQKFSSLYISQFIIMYSLDGKKWQTYRGNSTGTLMVFFGNVDSSGIKHNIFNPPIIARYIRLHPTHYSIRSTLRMELMGCDLNSCSMPLGMESKAISDAQITASSYFTNMFATWSPSKARLHLQGRSNAWRPQVNNPKEWLQVDFQKTMKVTGVTTQGVKSLLTSMYVKEFLISSSQDGHQWTLFFQNGKVKVFQGNQDSFTPVVNSLDPPLLTRYLRIHPQSWVHQIALRMEVLGCEAQDLYGAPGTSESATPESGPGSEPATSGSETPGTSESATPESGPGSEPATSGSETPGTSESATPESGPGTSTEPSEGSAPGSPAGSPTSTEEGTSESATPESGPGSEPATSGSETPGTSESATPESGPGSPAGSPTSTEEGSPAGSPTSTEEGTSTEPSEGSAPGTSESATPESGPGTSESATPESGPGTSESATPESGPGSEPATSGSETPGSEPATSGSETPGSPAGSPTSTEEGTSTEPSEGSAPGTSTEPSEGSAPGSEPATSGSETPGTSESATPESGPGTSTEPSEGSAPASSEQKLISEEDLSPATGHHHHHH

SEQ ID NO: 1280 - DNA, 6612 bp, synthetic construct
  misc_feature 1..6612: note = Description of Artificial Sequence: Synthetic polynucleotide
  source 1..6612: mol_type = other DNA
gccaccagaagatactacctgggtgcagtggaactgtcatgggactatatgcaaagtgatctcggtgagctgcctgtggacgcaagatttcctcctagagtgccaaaatcttttccattcggcgcgccaggctccagcccctccgcgagcacgggaaccggaccaggttcgtcaccctcagcatcaacggggacgggaccgggggcgtcaccaggaacgtcctccaccggctcgccgggtgcatcacccggaacgtcatcgaccggatcgccagggagctcgacgccatcaggcgcaacaggatcacctggctcaagccctagcgcgtcaaccggcacgggtccgggtgcctcccctggcacgtccagcaccggatcacccggatcgagcccatccgcctcaaccggaaccggacccggtacaccagggtcgggaacagcctcctcgtcaccaggctcctcaaccccctcgggagccacgggttcgcccggttcgtcaacgccttccggagcaactggtagccccggagcatcgccaggaacttcgagcacggggtcgcccgcctcgagcaacacctcagtcgtgtacaaaaagactctgtttgtagaattcacggatcaccttttcaacatcgctaagccaaggccaccctggatgggtctgctaggtcctaccatccaggctgaggtttatgatacagtggtcattacacttaagaacatggcttcccatcctgtcagtcttcatgctgttggtgtatcctactggaaagcttctgagggagctgaatatgatgatcagaccagtcaaagggagaaagaagatgataaagtcttccctggtggaagccatacatatgtctggcaggtcctgaaagagaatggtccaatggcctctgacccactgtgccttacctactcatatctttctcatgtggacctggtaaaagacttgaattcaggcctcattggagccctactagtatgtagagaagggagtctggccaaggaaaagacacagaccttgcacaaatttatactactttttgctgtatttgatgaagggaaaagttggcactcagaaacaaagaactccttgatgcaggatagggatgctgcatctgctcgggcctggcctaaaatgcacacagtcaatggttatgtaaacaggtctctgccaggtctgattggatgccacaggaaatcagtctattggcatgtgattggaatgggcaccactcctgaagtgcactcaatattcctcgaaggtcacacatttcttgtgaggaaccatcgccaggctagcttggaaatctcgccaataactttccttactgctcaaacactcttgatggaccttggacagtttctactgttttgtcatatctcttcccaccaacatgatggcatggaagcttatgtcaaagtagacagctgtccagaggaaccccaactacgaatgaaaaataatgaagaagcggaagactatgatgatgatcttactgattctgaaatggatgtggtcaggtttgatgatgacaactctccttcctttatccaaattcgctcagttgccaagaagcatcctaaaacttgggtacattacattgctgctgaagaggaggactgggactatgctcccttagtcctcgcccccgatgacagaagttataaaagtcaatatttgaacaatggccctcagcggattggtaggaagtacaaaaaagtccgatttatggcatacacagatgaaacctttaagactcgtgaagctattcagcatgaatcaggaatcttgggacctttactttatggggaagttggagacacactgttgattatatttaagaatcaagcaagcagaccatataacatctaccctcacggaatcactgatgtccgtcctttgtattcaaggagattaccaaaaggtgtaaaacatttgaaggattttccaattctgccaggagaaatattcaaatataaatggacagtgactgtagaagatgggccaactaaatcagatcctcggtgcctgacccgctattactctagtttcgttaatatggagagagatctagcttcaggactcattggccctctcctcatctgctacaaagaatctgtagatcaaagaggaaaccagataatgtcagacaagaggaatgtcatcctgttttctgtatttgatgagaaccgaagctggtacctcacagagaatatacaacgctttctccccaatccagctggagtgcagcttgaggatccagagttccaagcctccaacatcatgcacagcatcaatggctatgtttttgatagtttgcagttgtcagtttgtttgcatgaggtggcatactggtacattctaagcattggagcacagactgacttcctttctgtcttcttctctggatataccttcaaacacaaaatggtctatgaagacacactcaccctattcccattctcaggagaaactgtcttcatgtcgatggaaaacccaggtctatggattctggggtgccacaactcagactttcggaacagaggcatgaccgccttactgaaggtttctagttgtgacaagaacactggtgattattacgaggacagttatgaagatatttcagcatacttgctgagtaaaaacaatgccattgaaccaagaagcttctctcaaaacggcgcgccaagtcccgctggaagcccaactagcaccgaagaggggacctcagagtccgccacccccgagtccggccctggctctgagcctgccactagcggctccgagactcctggcacatccgaaagcgctacacccgagagtggacccggcacctctaccgagcccagtgagggctccgcccctggaacaagcaccgagcccagcgaaggcagcgccccagggacctccacagagcccagtgaaggcagtgctcctggcaccagcaccgaaccaagcgagggctctgcacccgggacctccaccgagccaagcgaaggctctgcccctggcacttccaccgagcccagcgaaggcagcgcccctgggagccccgctggctctcccaccagcactgaggagggcacatctaccgaaccaagtgaaggctctgcaccaggtgcctcgagcccaccagtcttgaaacgccatcaagctgaaataactcgtactactcttcagtcagatcaagaggaaatcgattatgatgataccatatcagttgaaatgaagaaggaagattttgacatttatgatgaggatgaaaatcagagcccccgcagctttcaaaagaaaacacgacactattttattgctgcagtggagaggctctgggattatgggatgagtagctccccacatgttctaagaaacagggctcagagtggcagtgtccctcagttcaagaaagttgttttccaggaatttactgatggctcctttactcagcccttataccgtggagaactaaatgaacatttgggactcctggggccatatataagagcagaagttgaagataatatcatggtaactttcagaaatcaggcctctcgtccctattccttctattctagccttatttcttatgaggaagatcagaggcaaggagcagaacctagaaaaaactttgtcaagcctaatgaaaccaaaacttacttttggaaagtgcaacatcatatggcacccactaaagatgagtttgactgcaaagcctgggcttatttctctgatgttgacctggaaaaagatgtgcactcaggcctgattggaccccttctggtctgccacactaacacactgaaccctgctcatgggagacaagtgacagtacaggaatttgctctgtttttcaccatctttgatgagaccaaaagctggtacttcactgaaaatatggaaagaaactgcagggctccctgcaatatccagatggaagatcccggcgcgccatctccagccgggtccccaacttcgaccgaggaagggacctccgagtcagctaccccggagtccggtcctggcacctccaccgaaccatcggagggcagcgcccctgggagccctgccgggagccctacaagcaccgaagagggcaccagtacagagccaagtgaggggagcgcccctggtactagtactgaaccatccgaggggtcagctccaggcacgagtgagtccgctacccccgagagcggaccgggctcagagcccgccacgagtggcagtgaaactccaggctcagaacccgccactagtgggtcagagactccaggcagccctgccggatcccctacgtccaccgaggagggaacatctgagtccgcaacacccgaatccggtccaggcacctccacggaacctagtgaaggctcggcaccaggtgcctcgagcacttttaaagagaattatcgcttccatgcaatcaatggctacataatggatacactacctggcttagtaatggctcaggatcaaaggattcgatggtatctgctcagcatgggcagcaatgaaaacatccattctattcatttcagtggacatgtgttcactgtacgaaaaaaagaggagtataaaatggcactgtacaatctctatccaggtgtttttgagacagtggaaatgttaccatccaaagctggaatttggcgggtggaatgccttattggcgagcatctacatgctgggatgagcacactttttctggtgtacagcaataagtgtcagactcccctgggaatggcttctggacacattagagattttcagattacagcttcaggacaatatggacagtgggccccaaagctggccagacttcattattccggatcaatcaatgcctggagcaccaaggagcccttttcttggatcaaggtggatctgttggcaccaatgattattcacggcatcaagacccagggtgcccgtcagaagttctccagcctctacatctctcagtttatcatcatgtatagtcttgatgggaagaagtggcagacttatcgaggaaattccactggaaccttaatggtcttctttggcaatgtggattcatctgggataaaacacaatatttttaaccctccaattattgctcgatacatccgtttgcacccaactcattatagcattcgcagcactcttcgcatggagttgatgggctgtgatttaaatagttgcagcatgccattgggaatggagagtaaagcaatatcagatgcacagattactgcttcatcctactttaccaatatgtttgccacctggtctccttcaaaagctcgacttcacctccaagggaggagtaatgcctggagacctcaggtgaataatccaaaagagtggctgcaagtggacttccagaagacaatgaaagtcacaggagtaactactcagggagtaaaatctctgcttaccagcatgtatgtgaaggagttcctcatctccagcagtcaagatggccatcagtggactctcttttttcagaatggcaaagtaaaggtttttcagggaaatcaagactccttcacacctgtggtgaactctctagacccaccgttactgactcgctaccttcgaattcacccccagagttgggtgcaccagattgccctgaggatggaggttctgggctgcgaggcacaggacctctacggcgcgccaggtacctcagagtctgctacccccgagtcagggccaggatcagagccagccacctccgggtctgagacacccgggacttccgagagtgccacccctgagtccggacccgggtccgagcccgccacttccggctccgaaactcccggcacaagcgagagcgctaccccagagtcaggaccaggaacatctacagagccctctgaaggctccgctccagggtccccagccggcagtcccactagcaccgaggagggaacctctgaaagcgccacacccgaatcagggccagggtctgagcctgctaccagcggcagcgagacaccaggcacctctgagtccgccacaccagagtccggacccggatctcccgctgggagccccacctccactgaggagggatctcctgctggctctccaacatctactgaggaaggtacctcaaccgagccatccgagggatcagctcccggcacctcagagtcggcaaccccggagtctggacccggaacttccgaaagtgccacaccagagtccggtcccgggacttcagaatcagcaacacccgagtccggccctgggtctgaacccgccacaagtggtagtgagacaccaggatcagaacctgctacctcagggtcagagacacccggatctccggcaggctcaccaacctccactgaggagggcaccagcacagaaccaagcgagggctccgcacccggaacaagcactgaacccagtgagggttcagcacccggctctgagccggccacaagtggcagtgagacacccggcacttcagagagtgccacccccgagagtggcccaggcactagtaccgagccctctgaaggcagtgcgccagcctcgagcgaacaaaaactcatctcagaagaggatctgtcacctgcaaccggtcatcatcaccatcaccattga

SEQ ID NO: 1281 - protein, 2203 aa, synthetic construct
  REGION 1..2203: note = Description of Artificial Sequence: Synthetic polypeptide
ATRRYYLGAVELSWDYMQSDLGELPVGAPGSSPSASTGTGPGSSPSASTGTGPGASPGTSSTGSPGASPGTSSTGSPGSSTPSGATGSPGSSPSASTGTGPGASPGTSSTGSPGSSPSASTGTGPGTPGSGTASSSPGSSTPSGATGSPGSSTPSGATGSPGASPGTSSTGSPASSDARFPPRVPKSFPFNTSVVYKKTLFVEFTDHLFNIAKPRPPWMGLLGPTIQAEVYDTVVITLKNMASHPVSLHAVGVSYWKASEGAEYDDQTSQREKEDDKVFPGGSHTYVWQVLKENGPMASDPLCLTYSYLSHVDLVKDLNSGLIGALLVCREGSLAKEKTQTLHKFILLFAVFDEGKSWHSETKNSLMQDRDAASARAWPKMHTVNGYVNRSLPGLIGCHRKSVYWHVIGMGTTPEVHSIFLEGHTFLVRNHRQASLEISPITFLTAQTLLMDLGQFLLFCHISSHQHDGMEAYVKVDSCPEEPQLRMKNNEEAEDYDDDLTDSEMDVVRFDDDNSPSFIQIRSVAKKHPKTWVHYIAAEEEDWDYAPLVLAPDDRSYKSQYLNNGPQRIGRKYKKVRFMAYTDETFKTREAIQHESGILGPLLYGEVGDTLLIIFKNQASRPYNIYPHGITDVRPLYSRRLPKGVKHLKDFPILPGEIFKYKWTVTVEDGPTKSDPRCLTRYYSSFVNMERDLASGLIGPLLICYKESVDQRGNQIMSDKRNVILFSVFDENRSWYLTENIQRFLPNPAGVQLEDPEFQASNIMHSINGYVFDSLQLSVCLHEVAYWYILSIGAQTDFLSVFFSGYTFKHKMVYEDTLTLFPFSGETVFMSMENPGLWILGCHNSDFRNRGMTALLKVSSCDKNTGDYYEDSYEDISAYLLSKNNAIEPRSFSQNGAPSPAGSPTSTEEGTSESATPESGPGSEPATSGSETPGTSESATPESGPGTSTEPSEGSAPGTSTEPSEGSAPGTSTEPSEGSAPGTSTEPSEGSAPGTSTEPSEGSAPGTSTEPSEGSAPGSPAGSPTSTEEGTSTEPSEGSAPGASSPPVLKRHQAEITRTTLQSDQEEIDYDDTISVEMKKEDFDIYDEDENQSPRSFQKKTRHYFIAAVERLWDYGMSSSPHVLRNRAQSGSVPQFKKVVFQEFTDGSFTQPLYRGELNEHLGLLGPYIRAEVEDNIMVTFRNQASRPYSFYSSLISYEEDQRQGAEPRKNFVKPNETKTYFWKVQHHMAPTKDEFDCKAWAYFSDVDLEKDVHSGLIGPLLVCHTNTLNPAHGRQVTVQEFALFFTIFDETKSWYFTENMERNCRAPCNIQMEDPGAPSPAGSPTSTEEGTSESATPESGPGTSTEPSEGSAPGSPAGSPTSTEEGTSTEPSEGSAPGTSTEPSEGSAPGTSESATPESGPGSEPATSGSETPGSEPATSGSETPGSPAGSPTSTEEGTSESATPESGPGTSTEPSEGSAPGASSTFKENYRFHAINGYIMDTLPGLVMAQDQRIRWYLLSMGSNENIHSIHFSGHVFTVRKKEEYKMALYNLYPGVFETVEMLPSKAGIWRVECLIGEHLHAGMSTLFLVYSNKCQTPLGMASGHIRDFQITASGQYGQWAPKLARLHYSGSINAWSTKEPFSWIKVDLLAPMIIHGIKTQGARQKFSSLYISQFIIMYSLDGKKWQTYRGNSTGTLMVFFGNVDSSGIKHNIFNPPIIARYIRLHPTHYSIRSTLRMELMGCDLNSCSMPLGMESKAISDAQITASSYFTNMFATWSPSKARLHLQGRSNAWRPQVNNPKEWLQVDFQKTMKVTGVTTQGVKSLLTSMYVKEFLISSSQDGHQWTLFFQNGKVKVFQGNQDSFTPVVNSLDPPLLTRYLRIHPQSWVHQIALRMEVLGCEAQDLYGAPGTSESATPESGPGSEPATSGSETPGTSESATPESGPGSEPATSGSETPGTSESATPESGPGTSTEPSEGSAPGSPAGSPTSTEEGTSESATPESGPGSEPATSGSETPGTSESATPESGPGSPAGSPTSTEEGSPAGSPTSTEEGTSTEPSEGSAPGTSESATPESGPGTSESATPESGPGTSESATPESGPGSEPATSGSETPGSEPATSGSETPGSPAGSPTSTEEGTSTEPSEGSAPGTSTEPSEGSAPGSEPATSGSETPGTSESATPESGPGTSTEPSEGSAPASSEQKLISEEDLSPATGHHHHHH

SEQ ID NO: 1282 - DNA, 6612 bp, synthetic construct
  misc_feature 1..6612: note = Description of Artificial Sequence: Synthetic polynucleotide
  source 1..6612: mol_type = other DNA
gccaccagaagatactacctgggtgcagtggaactgtcatgggactatatgcaaagtgatctcggtgagctgcctgtgggcgcgccaggctccagcccctccgcgagcacgggaaccggaccaggttcgtcaccctcagcatcaacggggacgggaccgggggcgtcaccaggaacgtcctccaccggctcgccgggtgcatcacccggaacgtcatcgaccggatcgccagggagctcgacgccatcaggcgcaacaggatcacctggctcaagccctagcgcgtcaaccggcacgggtccgggtgcctcccctggcacgtccagcaccggatcacccggatcgagcccatccgcctcaaccggaaccggacccggtacaccagggtcgggaacagcctcctcgtcaccaggctcctcaaccccctcgggagccacgggttcgcccggttcgtcaacgccttccggagcaactggtagccccggagcatcgccaggaacttcgagcacggggtcgcccgcctcgagcgacgcaagatttcctcctagagtgccaaaatcttttccattcaacacctcagtcgtgtacaaaaagactctgtttgtagaattcacggatcaccttttcaacatcgctaagccaaggccaccctggatgggtctgctaggtcctaccatccaggctgaggtttatgatacagtggtcattacacttaagaacatggcttcccatcctgtcagtcttcatgctgttggtgtatcctactggaaagcttctgagggagctgaatatgatgatcagaccagtcaaagggagaaagaagatgataaagtcttccctggtggaagccatacatatgtctggcaggtcctgaaagagaatggtccaatggcctctgacccactgtgccttacctactcatatctttctcatgtggacctggtaaaagacttgaattcaggcctcattggagccctactagtatgtagagaagggagtctggccaaggaaaagacacagaccttgcacaaatttatactactttttgctgtatttgatgaagggaaaagttggcactcagaaacaaagaactccttgatgcaggatagggatgctgcatctgctcgggcctggcctaaaatgcacacagtcaatggttatgtaaacaggtctctgccaggtctgattggatgccacaggaaatcagtctattggcatgtgattggaatgggcaccactcctgaagtgcactcaatattcctcgaaggtcacacatttcttgtgaggaaccatcgccaggctagcttggaaatctcgccaataactttccttactgctcaaacactcttgatggaccttggacagtttctactgttttgtcatatctcttcccaccaacatgatggcatggaagcttatgtcaaagtagacagctgtccagaggaaccccaactacgaatgaaaaataatgaagaagcggaagactatgatgatgatcttactgattctgaaatggatgtggtcaggtttgatgatgacaactctccttcctttatccaaattcgctcagttgccaagaagcatcctaaaacttgggtacattacattgctgctgaagaggaggactgggactatgctcccttagtcctcgcccccgatgacagaagttataaaagtcaatatttgaacaatggccctcagcggattggtaggaagtacaaaaaagtccgatttatggcatacacagatgaaacctttaagactcgtgaagctattcagcatgaatcaggaatcttgggacctttactttatggggaagttggagacacactgttgattatatttaagaatcaagcaagcagaccatataacatctaccctcacggaatcactgatgtccgtcctttgtattcaaggagattaccaaaaggtgtaaaacatttgaaggattttccaattctgccaggagaaatattcaaatataaatggacagtgactgtagaagatgggccaactaaatcagatcctcggtgcctgacccgctattactctagtttcgttaatatggagagagatctagcttcaggactcattggccctctcctcatctgctacaaagaatctgtagatcaaagaggaaaccagataatgtcagacaagaggaatgtcatcctgttttctgtatttgatgagaaccgaagctggtacctcacagagaatatacaacgctttctccccaatccagctggagtgcagcttgaggatccagagttccaagcctccaacatcatgcacagcatcaatggctatgtttttgatagtttgcagttgtcagtttgtttgcatgaggtggcatactggtacattctaagcattggagcacagactgacttcctttctgtcttcttctctggatataccttcaaacacaaaatggtctatgaagacacactcaccctattcccattctcaggagaaactgtcttcatgtcgatggaaaacccaggtctatggattctggggtgccacaactcagactttcggaacagaggcatgaccgccttactgaaggtttctagttgtgacaagaacactggtgattattacgaggacagttatgaagatatttcagcatacttgctgagtaaaaacaatgccattgaaccaagaagcttctctcaaaacggcgcgccaagtcccgctggaagcccaactagcaccgaagaggggacctcagagtccgccacccccgagtccggccctggctctgagcctgccactagcggctccgagactcctggcacatccgaaagcgctacacccgagagtggacccggcacctctaccgagcccagtgagggctccgcccctggaacaagcaccgagcccagcgaaggcagcgccccagggacctccacagagcccagtgaaggcagtgctcctggcaccagcaccgaaccaagcgagggctctgcacccgggacctccaccgagccaagcgaaggctctgcccctggcacttccaccgagcccagcgaaggcagcgcccctgggagccccgctggctctcccaccagcactgaggagggcacatctaccgaaccaagtgaaggctctgcaccaggtgcctcgagcccaccagtcttgaaacgccatcaagctgaaataactcgtactactcttcagtcagatcaagaggaaatcgattatgatgataccatatcagttgaaatgaagaaggaagattttgacatttatgatgaggatgaaaatcagagcccccgcagctttcaaaagaaaacacgacactattttattgctgcagtggagaggctctgggattatgggatgagtagctccccacatgttctaagaaacagggctcagagtggcagtgtccctcagttcaagaaagttgttttccaggaatttactgatggctcctttactcagcccttataccgtggagaactaaatgaacatttgggactcctggggccatatataagagcagaagttgaagataatatcatggtaactttcagaaatcaggcctctcgtccctattccttctattctagccttatttcttatgaggaagatcagaggcaaggagcagaacctagaaaaaactttgtcaagcctaatgaaaccaaaacttacttttggaaagtgcaacatcatatggcacccactaaagatgagtttgactgcaaagcctgggcttatttctctgatgttgacctggaaaaagatgtgcactcaggcctgattggaccccttctggtctgccacactaacacactgaaccctgctcatgggagacaagtgacagtacaggaatttgctctgtttttcaccatctttgatgagaccaaaagctggtacttcactgaaaatatggaaagaaactgcagggctccctgcaatatccagatggaagatcccggcgcgccatctccagccgggtccccaacttcgaccgaggaagggacctccgagtcagctaccccggagtccggtcctggcacctccaccgaaccatcggagggcagcgcccctgggagccctgccgggagccctacaagcaccgaagagggcaccagtacagagccaagtgaggggagcgcccctggtactagtactgaaccatccgaggggtcagctccaggcacgagtgagtccgctacccccgagagcggaccgggctcagagcccgccacgagtggcagtgaaactccaggctcagaacccgccactagtgggtcagagactccaggcagccctgccggatcccctacgtccaccgaggagggaacatctgagtccgcaacacccgaatccggtccaggcacctccacggaacctagtgaaggctcggcaccaggtgcctcgagcacttttaaagagaattatcgcttccatgcaatcaatggctacataatggatacactacctggcttagtaatggctcaggatcaaaggattcgatggtatctgctcagcatgggcagcaatgaaaacatccattctattcatttcagtggacatgtgttcactgtacgaaaaaaagaggagtataaaatggcactgtacaatctctatccaggtgtttttgagacagtggaaatgttaccatccaaagctggaatttggcgggtggaatgccttattggcgagcatctacatgctgggatgagcacactttttctggtgtacagcaataagtgtcagactcccctgggaatggcttctggacacattagagattttcagattacagcttcaggacaatatggacagtgggccccaaagctggccagacttcattattccggatcaatcaatgcctggagcaccaaggagcccttttcttggatcaaggtggatctgttggcaccaatgattattcacggcatcaagacccagggtgcccgtcagaagttctccagcctctacatctctcagtttatcatcatgtatagtcttgatgggaagaagtggcagacttatcgaggaaattccactggaaccttaatggtcttctttggcaatgtggattcatctgggataaaacacaatatttttaaccctccaattattgctcgatacatccgtttgcacccaactcattatagcattcgcagcactcttcgcatggagttgatgggctgtgatttaaatagttgcagcatgccattgggaatggagagtaaagcaatatcagatgcacagattactgcttcatcctactttaccaatatgtttgccacctggtctccttcaaaagctcgacttcacctccaagggaggagtaatgcctggagacctcaggtgaataatccaaaagagtggctgcaagtggacttccagaagacaatgaaagtcacaggagtaactactcagggagtaaaatctctgcttaccagcatgtatgtgaaggagttcctcatctccagcagtcaagatggccatcagtggactctcttttttcagaatggcaaagtaaaggtttttcagggaaatcaagactccttcacacctgtggtgaactctctagacccaccgttactgactcgctaccttcgaattcacccccagagttgggtgcaccagattgccctgaggatggaggttctgggctgcgaggcacaggacctctacggcgcgccaggtacctcagagtctgctacccccgagtcagggccaggatcagagccagccacctccgggtctgagacacccgggacttccgagagtgccacccctgagtccggacccgggtccgagcccgccacttccggctccgaaactcccggcacaagcgagagcgctaccccagagtcaggaccaggaacatctacagagccctctgaaggctccgctccagggtccccagccggcagtcccactagcaccgaggagggaacctctgaaagcgccacacccgaatcagggccagggtctgagcctgctaccagcggcagcgagacaccaggcacctctgagtccgccacaccagagtccggacccggatctcccgctgggagccccacctccactgaggagggatctcctgctggctctccaacatctactgaggaaggtacctcaaccgagccatccgagggatcagctcccggcacctcagagtcggcaaccccggagtctggacccggaacttccgaaagtgccacaccagagtccggtcccgggacttcagaatcagcaacacccgagtccggccctgggtctgaacccgccacaagtggtagtgagacaccaggatcagaacctgctacctcagggtcagagacacccggatctccggcaggctcaccaacctccactgaggagggcaccagcacagaaccaagcgagggctccgcacccggaacaagcactgaacccagtgagggttcagcacccggctctgagccggccacaagtggcagtgagacacccggcacttcagagagtgccacccccgagagtggcccaggcactagtaccgagccctctgaaggcagtgcgccagcctcgagcgaacaaaaactcatctcagaagaggatctgtcacctgcaaccggtcatcatcaccatcaccattga

SEQ ID NO: 1283 - protein, 2203 aa, synthetic construct
  REGION 1..2203: note = Description of Artificial Sequence: Synthetic polypeptide
ATRRYYLGAVELSWDYMQGAPTSESATPESGPGSEPATSGSETPGTSESATPESGPGSEPATSGSETPGTSESATPESGPGTSTEPSEGSAPGSPAGSPTSTEEGTSESATPESGPGSEPATSGSETPGTSESATPESGPGSPAGSPTSTEEGSPAGSPTSTEEGASSSDLGELPVDARFPPRVPKSFPFNTSVVYKKTLFVEFTDHLFNIAKPRPPWMGLLGPTIQAEVYDTVVITLKNMASHPVSLHAVGVSYWKASEGAEYDDQTSQREKEDDKVFPGGSHTYVWQVLKENGPMASDPLCLTYSYLSHVDLVKDLNSGLIGALLVCREGSLAKEKTQTLHKFILLFAVFDEGKSWHSETKNSLMQDRDAASARAWPKMHTVNGYVNRSLPGLIGCHRKSVYWHVIGMGTTPEVHSIFLEGHTFLVRNHRQASLEISPITFLTAQTLLMDLGQFLLFCHISSHQHDGMEAYVKVDSCPEEPQLRMKNNEEAEDYDDDLTDSEMDVVRFDDDNSPSFIQIRSVAKKHPKTWVHYIAAEEEDWDYAPLVLAPDDRSYKSQYLNNGPQRIGRKYKKVRFMAYTDETFKTREAIQHESGILGPLLYGEVGDTLLIIFKNQASRPYNIYPHGITDVRPLYSRRLPKGVKHLKDFPILPGEIFKYKWTVTVEDGPTKSDPRCLTRYYSSFVNMERDLASGLIGPLLICYKESVDQRGNQIMSDKRNVILFSVFDENRSWYLTENIQRFLPNPAGVQLEDPEFQASNIMHSINGYVFDSLQLSVCLHEVAYWYILSIGAQTDFLSVFFSGYTFKHKMVYEDTLTLFPFSGETVFMSMENPGLWILGCHNSDFRNRGMTALLKVSSCDKNTGDYYEDSYEDISAYLLSKNNAIEPRSFSQNGAPSPAGSPTSTEEGTSESATPESGPGSEPATSGSETPGTSESATPESGPGTSTEPSEGSAPGTSTEPSEGSAPGTSTEPSEGSAPGTSTEPSEGSAPGTSTEPSEGSAPGTSTEPSEGSAPGSPAGSPTSTEEGTSTEPSEGSAPGASSPPVLKRHQAEITRTTLQSDQEEIDYDDTISVEMKKEDFDIYDEDENQSPRSFQKKTRHYFIAAVERLWDYGMSSSPHVLRNRAQSGSVPQFKKVVFQEFTDGSFTQPLYRGELNEHLGLLGPYIRAEVEDNIMVTFRNQASRPYSFYSSLISYEEDQRQGAEPRKNFVKPNETKTYFWKVQHHMAPTKDEFDCKAWAYFSDVDLEKDVHSGLIGPLLVCHTNTLNPAHGRQVTVQEFALFFTIFDETKSWYFTENMERNCRAPCNIQMEDPGAPGTPGSGTASSSPGASPGTSSTGSPGASPGTSSTGSPGASPGTSSTGSPGSSPSASTGTGPGTPGSGTASSSPGASPGTSSTGSPGASPGTSSTGSPGASPGTSSTGSPGSSTPSGATGSPGSSTPSGATGSPGASPGTSSTGSPASSTFKENYRFHAINGYIMDTLPGLVMAQDQRIRWYLLSMGSNENIHSIHFSGHVFTVRKKEEYKMALYNLYPGVFETVEMLPSKAGIWRVECLIGEHLHAGMSTLFLVYSNKCQTPLGMASGHIRDFQITASGQYGQWAPKLARLHYSGSINAWSTKEPFSWIKVDLLAPMIIHGIKTQGARQKFSSLYISQFIIMYSLDGKKWQTYRGNSTGTLMVFFGNVDSSGIKHNIFNPPIIARYIRLHPTHYSIRSTLRMELMGCDLNSCSMPLGMESKAISDAQITASSYFTNMFATWSPSKARLHLQGRSNAWRPQVNNPKEWLQVDFQKTMKVTGVTTQGVKSLLTSMYVKEFLISSSQDGHQWTLFFQNGKVKVFQGNQDSFTPVVNSLDPPLLTRYLRIHPQSWVHQIALRMEVLGCEAQDLYGAPGTSESATPESGPGSEPATSGSETPGTSESATPESGPGSEPATSGSETPGTSESATPESGPGTSTEPSEGSAPGSPAGSPTSTEEGTSESATPESGPGSEPATSGSETPGTSESATPESGPGSPAGSPTSTEEGSPAGSPTSTEEGTSTEPSEGSAPGTSESATPESGPGTSESATPESGPGTSESATPESGPGSEPATSGSETPGSEPATSGSETPGSPAGSPTSTEEGTSTEPSEGSAPGTSTEPSEGSAPGSEPATSGSETPGTSESATPESGPGTSTEPSEGSAPASSEQKLISEEDLSPATGHHHHHH

SEQ ID NO: 1284 - DNA, 6612 bp, synthetic construct
  misc_feature 1..6612: note = Description of Artificial Sequence: Synthetic polynucleotide
  source 1..6612: mol_type = other DNA
gccaccagaagatactacctgggtgcagtggaactgtcatgggactatatgcaaggcgcgccaacatcagagagcgccacccctgaaagtggtcccgggagcgagccagccacatctgggtcggaaacgccaggcacaagtgagtctgcaactcccgagtccggacctggctccgagcctgccactagcggctccgagactccgggaacttccgagagcgctacaccagaaagcggacccggaaccagtaccgaacctagcgagggctctgctccgggcagcccagccggctctcctacatccacggaggagggcacttccgaatccgccaccccggagtcagggccaggatctgaacccgctacctcaggcagtgagacgccaggaacgagcgagtccgctacaccggagagtgggccagggagccctgctggatctcctacgtccactgaggaagggtcaccagcgggctcgcccaccagcactgaagaaggtgcctcgagcagtgatctcggtgagctgcctgtggacgcaagatttcctcctagagtgccaaaatcttttccattcaacacctcagtcgtgtacaaaaagactctgtttgtagaattcacggatcaccttttcaacatcgctaagccaaggccaccctggatgggtctgctaggtcctaccatccaggctgaggtttatgatacagtggtcattacacttaagaacatggcttcccatcctgtcagtcttcatgctgttggtgtatcctactggaaagcttctgagggagctgaatatgatgatcagaccagtcaaagggagaaagaagatgataaagtcttccctggtggaagccatacatatgtctggcaggtcctgaaagagaatggtccaatggcctctgacccactgtgccttacctactcatatctttctcatgtggacctggtaaaagacttgaattcaggcctcattggagccctactagtatgtagagaagggagtctggccaaggaaaagacacagaccttgcacaaatttatactactttttgctgtatttgatgaagggaaaagttggcactcagaaacaaagaactccttgatgcaggatagggatgctgcatctgctcgggcctggcctaaaatgcacacagtcaatggttatgtaaacaggtctctgccaggtctgattggatgccacaggaaatcagtctattggcatgtgattggaatgggcaccactcctgaagtgcactcaatattcctcgaaggtcacacatttcttgtgaggaaccatcgccaggctagcttggaaatctcgccaataactttccttactgctcaaacactcttgatggaccttggacagtttctactgttttgtcatatctcttcccaccaacatgatggcatggaagcttatgtcaaagtagacagctgtccagaggaaccccaactacgaatgaaaaataatgaagaagcggaagactatgatgatgatcttactgattctgaaatggatgtggtcaggtttgatgatgacaactctccttcctttatccaaattcgctcagttgccaagaagcatcctaaaacttgggtacattacattgctgctgaagaggaggactgggactatgctcccttagtcctcgcccccgatgacagaagttataaaagtcaatatttgaacaatggccctcagcggattggtaggaagtacaaaaaagtccgatttatggcatacacagatgaaacctttaagactcgtgaagctattcagcatgaatcaggaatcttgggacctttactttatggggaagttggagacacactgttgattatatttaagaatcaagcaagcagaccatataacatctaccctcacggaatcactgatgtccgtcctttgtattcaaggagattaccaaaaggtgtaaaacatttgaaggattttccaattctgccaggagaaatattcaaatataaatggacagtgactgtagaagatgggccaactaaatcagatcctcggtgcctgacccgctattactctagtttcgttaatatggagagagatctagcttcaggactcattggccctctcctcatctgctacaaagaatctgtagatcaaagaggaaaccagataatgtcagacaagaggaatgtcatcctgttttctgtatttgatgagaaccgaagctggtacctcacagagaatatacaacgctttctccccaatccagctggagtgcagcttgaggatccagagttccaagcctccaacatcatgcacagcatcaatggctatgtttttgatagtttgcagttgtcagtttgtttgcatgaggtggcatactggtacattctaagcattggagcacagactgacttcctttctgtcttcttctctggatataccttcaaacacaaaatggtctatgaagacacactcaccctattcccattctcaggagaaactgtcttcatgtcgatggaaaacccaggtctatggattctggggtgccacaactcagactttcggaacagaggcatgaccgccttactgaaggtttctagttgtgacaagaacactggtgattattacgaggacagttatgaagatatttcagcatacttgctgagtaaaaacaatgccattgaaccaagaagcttctctcaaaacggcgcgccaagtcccgctggaagcccaactagcaccgaagaggggacctcagagtccgccacccccgagtccggccctggctctgagcctgccactagcggctccgagactcctggcacatccgaaagcgctacacccgagagtggacccggcacctctaccgagcccagtgagggctccgcccctggaacaagcaccgagcccagcgaaggcagcgccccagggacctccacagagcccagtgaaggcagtgctcctggcaccagcaccgaaccaagcgagggctctgcacccgggacctccaccgagccaagcgaaggctctgcccctggcacttccaccgagcccagcgaaggcagcgcccctgggagccccgctggctctcccaccagcactgaggagggcacatctaccgaaccaagtgaaggctctgcaccaggtgcctcgagcccaccagtcttgaaacgccatcaagctgaaataactcgtactactcttcagtcagatcaagaggaaatcgattatgatgataccatatcagttgaaatgaagaaggaagattttgacatttatgatgaggatgaaaatcagagcccccgcagctttcaaaagaaaacacgacactattttattgctgcagtggagaggctctgggattatgggatgagtagctccccacatgttctaagaaacagggctcagagtggcagtgtccctcagttcaagaaagttgttttccaggaatttactgatggctcctttactcagcccttataccgtggagaactaaatgaacatttgggactcctggggccatatataagagcagaagttgaagataatatcatggtaactttcagaaatcaggcctctcgtccctattccttctattctagccttatttcttatgaggaagatcagaggcaaggagcagaacctagaaaaaactttgtcaagcctaatgaaaccaaaacttacttttggaaagtgcaacatcatatggcacccactaaagatgagtttgactgcaaagcctgggcttatttctctgatgttgacctggaaaaagatgtgcactcaggcctgattggaccccttctggtctgccacactaacacactgaaccctgctcatgggagacaagtgacagtacaggaatttgctctgtttttcaccatctttgatgagaccaaaagctggtacttcactgaaaatatggaaagaaactgcagggctccctgcaatatccagatggaagatcccggcgcgccaggtacacccggatcgggtacagcgtcatcgagccccggtgcgtcacctggtacgtcgagcacggggtcgccaggggcgtcccctgggacgtcctcaacaggctcgcccggtgcgtcacccggcacgtcgtccacgggttcacctggtagctccccttccgcgtccactggcaccgggcctggaactccggggagcggcacagcgagctcgtcgccgggagcatcgcctgggacatcgagcaccgggtcgccaggagcatcgcccggaacatccagcacaggaagccccggcgcgtcgcccgggacatcaagcacaggttccccgggatcgagcacgccgtccggagccactggatcaccagggagctcgacaccttccggcgcaacgggatcgcccggagccagcccgggtacgtcaagcactggctcccctgcctcgagcacttttaaagagaattatcgcttccatgcaatcaatggctacataatggatacactacctggcttagtaatggctcaggatcaaaggattcgatggtatctgctcagcatgggcagcaatgaaaacatccattctattcatttcagtggacatgtgttcactgtacgaaaaaaagaggagtataaaatggcactgtacaatctctatccaggtgtttttgagacagtggaaatgttaccatccaaagctggaatttggcgggtggaatgccttattggcgagcatctacatgctgggatgagcacactttttctggtgtacagcaataagtgtcagactcccctgggaatggcttctggacacattagagattttcagattacagcttcaggacaatatggacagtgggccccaaagctggccagacttcattattccggatcaatcaatgcctggagcaccaaggagcccttttcttggatcaaggtggatctgttggcaccaatgattattcacggcatcaagacccagggtgcccgtcagaagttctccagcctctacatctctcagtttatcatcatgtatagtcttgatgggaagaagtggcagacttatcgaggaaattccactggaaccttaatggtcttctttggcaatgtggattcatctgggataaaacacaatatttttaaccctccaattattgctcgatacatccgtttgcacccaactcattatagcattcgcagcactcttcgcatggagttgatgggctgtgatttaaatagttgcagcatgccattgggaatggagagtaaagcaatatcagatgcacagattactgcttcatcctactttaccaatatgtttgccacctggtctccttcaaaagctcgacttcacctccaagggaggagtaatgcctggagacctcaggtgaataatccaaaagagtggctgcaagtggacttccagaagacaatgaaagtcacaggagtaactactcagggagtaaaatctctgcttaccagcatgtatgtgaaggagttcctcatctccagcagtcaagatggccatcagtggactctcttttttcagaatggcaaagtaaaggtttttcagggaaatcaagactccttcacacctgtggtgaactctctagacccaccgttactgactcgctaccttcgaattcacccccagagttgggtgcaccagattgccctgaggatggaggttctgggctgcgaggcacaggacctctacggcgcgccaggtacctcagagtctgctacccccgagtcagggccaggatcagagccagccacctccgggtctgagacacccgggacttccgagagtgccacccctgagtccggacccgggtccgagcccgccacttccggctccgaaactcccggcacaagcgagagcgctaccccagagtcaggaccaggaacatctacagagccctctgaaggctccgctccagggtccccagccggcagtcccactagcaccgaggagggaacctctgaaagcgccacacccgaatcagggccagggtctgagcctgctaccagcggcagcgagacaccaggcacctctgagtccgccacaccagagtccggacccggatctcccgctgggagccccacctccactgaggagggatctcctgctggctctccaacatctactgaggaaggtacctcaaccgagccatccgagggatcagctcccggcacctcagagtcggcaaccccggagtctggacccggaacttccgaaagtgccacaccagagtccggtcccgggacttcagaatcagcaacacccgagtccggccctgggtctgaacccgccacaagtggtagtgagacaccaggatcagaacctgctacctcagggtcagagacacccggatctccggcaggctcaccaacctccactgaggagggcaccagcacagaaccaagcgagggctccgcacccggaacaagcactgaacccagtgagggttcagcacccggctctgagccggccacaagtggcagtgagacacccggcacttcagagagtgccacccccgagagtggcccaggcactagtaccgagccctctgaaggcagtgcgccagcctcgagcgaacaaaaactcatctcagaagaggatctgtcacctgcaaccggtcatcatcaccatcaccattga

SEQ ID NO: 1285 - protein, 2203 aa, synthetic construct
  REGION 1..2203: note = Description of Artificial Sequence: Synthetic polypeptide
ATRRYYLGAVELSWDYMQSDLGELPVGAPGSSPSASTGTGPGSSPSASTGTGPGASPGTSSTGSPGASPGTSSTGSPGSSTPSGATGSPGSSPSASTGTGPGASPGTSSTGSPGSSPSASTGTGPGTPGSGTASSSPGSSTPSGATGSPGSSTPSGATGSPGASPGTSSTGSPASSDARFPPRVPKSFPFNTSVVYKKTLFVEFTDHLFNIAKPRPPWMGLLGPTIQAEVYDTVVITLKNMASHPVSLHAVGVSYWKASEGAEYDDQTSQREKEDDKVFPGGSHTYVWQVLKENGPMASDPLCLTYSYLSHVDLVKDLNSGLIGALLVCREGSLAKEKTQTLHKFILLFAVFDEGKSWHSETKNSLMQDRDAASARAWPKMHTVNGYVNRSLPGLIGCHRKSVYWHVIGMGTTPEVHSIFLEGHTFLVRNHRQASLEISPITFLTAQTLLMDLGQFLLFCHISSHQHDGMEAYVKVDSCPEEPQLRMKNNEEAEDYDDDLTDSEMDVVRFDDDNSPSFIQIRSVAKKHPKTWVHYIAAEEEDWDYAPLVLAPDDRSYKSQYLNNGPQRIGRKYKKVRFMAYTDETFKTREAIQHESGILGPLLYGEVGDTLLIIFKNQASRPYNIYPHGITDVRPLYSRRLPKGVKHLKDFPILPGEIFKYKWTVTVEDGPTKSDPRCLTRYYSSFVNMERDLASGLIGPLLICYKESVDQRGNQIMSDKRNVILFSVFDENRSWYLTENIQRFLPNPAGVQLEDPEFQASNIMHSINGYVFDSLQLSVCLHEVAYWYILSIGAQTDFLSVFFSGYTFKHKMVYEDTLTLFPFSGETVFMSMENPGLWILGCHNSDFRNRGMTALLKVSSCDKNTGDYYEDSYEDISAYLLSKNNAIEPRSFSQNGAPSPAGSPTSTEEGTSESATPESGPGSEPATSGSETPGTSESATPESGPGTSTEPSEGSAPGTSTEPSEGSAPGTSTEPSEGSAPGTSTEPSEGSAPGTSTEPSEGSAPGTSTEPSEGSAPGSPAGSPTSTEEGTSTEPSEGSAPGASSPPVLKRHQAEITRTTLQSDQEEIDYDDTISVEMKKEDFDIYDEDENQSPRSFQKKTRHYFIAAVERLWDYGMSSSPHVLRNRAQSGSVPQFKKVVFQEFTDGSFTQPLYRGELNEHLGLLGPYIRAEVEDNIMVTFRNQASRPYSFYSSLISYEEDQRQGAEPRKNFVKPNETKTYFWKVQHHMAPTKDEFDCKAWAYFSDVDLEKDVHSGLIGPLLVCHTNTLNPAHGRQVTVQEFALFFTIFDETKSWYFTENMERNCRAPCNIQMEDPGAPGTPGSGTASSSPGASPGTSSTGSPGASPGTSSTGSPGASPGTSSTGSPGSSPSASTGTGPGTPGSGTASSSPGASPGTSSTGSPGASPGTSSTGSPGASPGTSSTGSPGSSTPSGATGSPGSSTPSGATGSPGASPGTSSTGSPASSTFKENYRFHAINGYIMDTLPGLVMAQDQRIRWYLLSMGSNENIHSIHFSGHVFTVRKKEEYKMALYNLYPGVFETVEMLPSKAGIWRVECLIGEHLHAGMSTLFLVYSNKCQTPLGMASGHIRDFQITASGQYGQWAPKLARLHYSGSINAWSTKEPFSWIKVDLLAPMIIHGIKTQGARQKFSSLYISQFIIMYSLDGKKWQTYRGNSTGTLMVFFGNVDSSGIKHNIFNPPIIARYIRLHPTHYSIRSTLRMELMGCDLNSCSMPLGMESKAISDAQITASSYFTNMFATWSPSKARLHLQGRSNAWRPQVNNPKEWLQVDFQKTMKVTGVTTQGVKSLLTSMYVKEFLISSSQDGHQWTLFFQNGKVKVFQGNQDSFTPVVNSLDPPLLTRYLRIHPQSWVHQIALRMEVLGCEAQDLYGAPGTSESATPESGPGSEPATSGSETPGTSESATPESGPGSEPATSGSETPGTSESATPESGPGTSTEPSEGSAPGSPAGSPTSTEEGTSESATPESGPGSEPATSGSETPGTSESATPESGPGSPAGSPTSTEEGSPAGSPTSTEEGTSTEPSEGSAPGTSESATPESGPGTSESATPESGPGTSESATPESGPGSEPATSGSETPGSEPATSGSETPGSPAGSPTSTEEGTSTEPSEGSAPGTSTEPSEGSAPGSEPATSGSETPGTSESATPESGPGTSTEPSEGSAPASSEQKLISEEDLSPATGHHHHHH

SEQ ID NO: 1286 - DNA, 6612 bp, synthetic construct
  misc_feature 1..6612: note = Description of Artificial Sequence: Synthetic polynucleotide
  source 1..6612: mol_type = other DNA
gccaccagaagatactacctgggtgcagtggaactgtcatgggactatatgcaaagtgatctcggtgagctgcctgtgggcgcgccaggctccagcccctccgcgagcacgggaaccggaccaggttcgtcaccctcagcatcaacggggacgggaccgggggcgtcaccaggaacgtcctccaccggctcgccgggtgcatcacccggaacgtcatcgaccggatcgccagggagctcgacgccatcaggcgcaacaggatcacctggctcaagccctagcgcgtcaaccggcacgggtccgggtgcctcccctggcacgtccagcaccggatcacccggatcgagcccatccgcctcaaccggaaccggacccggtacaccagggtcgggaacagcctcctcgtcaccaggctcctcaaccccctcgggagccacgggttcgcccggttcgtcaacgccttccggagcaactggtagccccggagcatcgccaggaacttcgagcacggggtcgcccgcctcgagcgacgcaagatttcctcctagagtgccaaaatcttttccattcaacacctcagtcgtgtacaaaaagactctgtttgtagaattcacggatcaccttttcaacatcgctaagccaaggccaccctggatgggtctgctaggtcctaccatccaggctgaggtttatgatacagtggtcattacacttaagaacatggcttcccatcctgtcagtcttcatgctgttggtgtatcctactggaaagcttctgagggagctgaatatgatgatcagaccagtcaaagggagaaagaagatgataaagtcttccctggtggaagccatacatatgtctggcaggtcctgaaagagaatggtccaatggcctctgacccactgtgccttacctactcatatctttctcatgtggacctggtaaaagacttgaattcaggcctcattggagccctactagtatgtagagaagggagtctggccaaggaaaagacacagaccttgcacaaatttatactactttttgctgtatttgatgaagggaaaagttggcactcagaaacaaagaactccttgatgcaggatagggatgctgcatctgctcgggcctggcctaaaatgcacacagtcaatggttatgtaaacaggtctctgccaggtctgattggatgccacaggaaatcagtctattggcatgtgattggaatgggcaccactcctgaagtgcactcaatattcctcgaaggtcacacatttcttgtgaggaaccatcgccaggctagcttggaaatctcgccaataactttccttactgctcaaacactcttgatggaccttggacagtttctactgttttgtcatatctcttcccaccaacatgatggcatggaagcttatgtcaaagtagacagctgtccagaggaaccccaactacgaatgaaaaataatgaagaagcggaagactatgatgatgatcttactgattctgaaatggatgtggtcaggtttgatgatgacaactctccttcctttatccaaattcgctcagttgccaagaagcatcctaaaacttgggtacattacattgctgctgaagaggaggactgggactatgctcccttagtcctcgcccccgatgacagaagttataaaagtcaatatttgaacaatggccctcagcggattggtaggaagtacaaaaaagtccgatttatggcatacacagatgaaacctttaagactcgtgaagctattcagcatgaatcaggaatcttgggacctttactttatggggaagttggagacacactgttgattatatttaagaatcaagcaagcagaccatataacatctaccctcacggaatcactgatgtccgtcctttgtattcaaggagattaccaaaaggtgtaaaacatttgaaggattttccaattctgccaggagaaatattcaaatataaatggacagtgactgtagaagatgggccaactaaatcagatcctcggtgcctgacccgctattactctagtttcgttaatatggagagagatctagcttcaggactcattggccctctcctcatctgctacaaagaatctgtagatcaaagaggaaaccagataatgtcagacaagaggaatgtcatcctgttttctgtatttgatgagaaccgaagctggtacctcacagagaatatacaacgctttctccccaatccagctggagtgcagcttgaggatccagagttccaagcctccaacatcatgcacagcatcaatggctatgtttttgatagtttgcagttgtcagtttgtttgcatgaggtggcatactggtacattctaagcattggagcacagactgacttcctttctgtcttcttctctggatataccttcaaacacaaaatggtctatgaagacacactcaccctattcccattctcaggagaaactgtcttcatgtcgatggaaaacccaggtctatggattctggggtgccacaactcagactttcggaacagaggcatgaccgccttactgaaggtttctagttgtgacaagaacactggtgattattacgaggacagttatgaagatatttcagcatacttgctgagtaaaaacaatgccattgaaccaagaagcttctctcaaaacggcgcgccaagtcccgctggaagcccaactagcaccgaagaggggacctcagagtccgccacccccgagtccggccctggctctgagcctgccactagcggctccgagactcctggcacatccgaaagcgctacacccgagagtggacccggcacctctaccgagcccagtgagggctccgcccctggaacaagcaccgagcccagcgaaggcagcgccccagggacctccacagagcccagtgaaggcagtgctcctggcaccagcaccgaaccaagcgagggctctgcacccgggacctccaccgagccaagcgaaggctctgcccctggcacttccaccgagcccagcgaaggcagcgcccctgggagccccgctggctctcccaccagcactgaggagggcacatctaccgaaccaagtgaaggctctgcaccaggtgcctcgagcccaccagtcttgaaacgccatcaagctgaaataactcgtactactcttcagtcagatcaagaggaaatcgattatgatgataccatatcagttgaaatgaagaaggaagattttgacatttatgatgaggatgaaaatcagagcccccgcagctttcaaaagaaaacacgacactattttattgctgcagtggagaggctctgggattatgggatgagtagctccccacatgttctaagaaacagggctcagagtggcagtgtccctcagttcaagaaagttgttttccaggaatttactgatggctcctttactcagcccttataccgtggagaactaaatgaacatttgggactcctggggccatatataagagcagaagttgaagataatatcatggtaactttcagaaatcaggcctctcgtccctattccttctattctagccttatttcttatgaggaagatcagaggcaaggagcagaacctagaaaaaactttgtcaagcctaatgaaaccaaaacttacttttggaaagtgcaacatcatatggcacccactaaagatgagtttgactgcaaagcctgggcttatttctctgatgttgacctggaaaaagatgtgcactcaggcctgattggaccccttctggtctgccacactaacacactgaaccctgctcatgggagacaagtgacagtacaggaatttgctctgtttttcaccatctttgatgagaccaaaagctggtacttcactgaaaatatggaaagaaactgcagggctccctgcaatatccagatggaagatcccggcgcgccaggtacacccggatcgggtacagcgtcatcgagccccggtgcgtcacctggtacgtcgagcacggggtcgccaggggcgtcccctgggacgtcctcaacaggctcgcccggtgcgtcacccggcacgtcgtccacgggttcacctggtagctccccttccgcgtccactggcaccgggcctggaactccggggagcggcacagcgagctcgtcgccgggagcatcgcctgggacatcgagcaccgggtcgccaggagcatcgcccggaacatccagcacaggaagccccggcgcgtcgcccgggacatcaagcacaggttccccgggatcgagcacgccgtccggagccactggatcaccagggagctcgacaccttccggcgcaacgggatcgcccggagccagcccgggtacgtcaagcactggctcccctgcctcgagcacttttaaagagaattatcgcttccatgcaatcaatggctacataatggatacactacctggcttagtaatggctcaggatcaaaggattcgatggtatctgctcagcatgggcagcaatgaaaacatccattctattcatttcagtggacatgtgttcactgtacgaaaaaaagaggagtataaaatggcactgtacaatctctatccaggtgtttttgagacagtggaaatgttaccatccaaagctggaatttggcgggtggaatgccttattggcgagcatctacatgctgggatgagcacactttttctggtgtacagcaataagtgtcagactcccctgggaatggcttctggacacattagagattttcagattacagcttcaggacaatatggacagtgggccccaaagctggccagacttcattattccggatcaatcaatgcctggagcaccaaggagcccttttcttggatcaaggtggatctgttggcaccaatgattattcacggcatcaagacccagggtgcccgtcagaagttctccagcctctacatctctcagtttatcatcatgtatagtcttgatgggaagaagtggcagacttatcgaggaaattccactggaaccttaatggtcttctttggcaatgtggattcatctgggataaaacacaatatttttaaccctccaattattgctcgatacatccgtttgcacccaactcattatagcattcgcagcactcttcgcatggagttgatgggctgtgatttaaatagttgcagcatgccattgggaatggagagtaaagcaatatcagatgcacagattactgcttcatcctactttaccaatatgtttgccacctggtctccttcaaaagctcgacttcacctccaagggaggagtaatgcctggagacctcaggtgaataatccaaaagagtggctgcaagtggacttccagaagacaatgaaagtcacaggagtaactactcagggagtaaaatctctgcttaccagcatgtatgtgaaggagttcctcatctccagcagtcaagatggccatcagtggactctcttttttcagaatggcaaagtaaaggtttttcagggaaatcaagactccttcacacctgtggtgaactctctagacccaccgttactgactcgctaccttcgaattcacccccagagttgggtgcaccagattgccctgaggatggaggttctgggctgcgaggcacaggacctctacggcgcgccaggtacctcagagtctgctacccccgagtcagggccaggatcagagccagccacctccgggtctgagacacccgggacttccgagagtgccacccctgagtccggacccgggtccgagcccgccacttccggctccgaaactcccggcacaagcgagagcgctaccccagagtcaggaccaggaacatctacagagccctctgaaggctccgctccagggtccccagccggcagtcccactagcaccgaggagggaacctctgaaagcgccacacccgaatcagggccagggtctgagcctgctaccagcggcagcgagacaccaggcacctctgagtccgccacaccagagtccggacccggatctcccgctgggagccccacctccactgaggagggatctcctgctggctctccaacatctactgaggaaggtacctcaaccgagccatccgagggatcagctcccggcacctcagagtcggcaaccccggagtctggacccggaacttccgaaagtgccacaccagagtccggtcccgggacttcagaatcagcaacacccgagtccggccctgggtctgaacccgccacaagtggtagtgagacaccaggatcagaacctgctacctcagggtcagagacacccggatctccggcaggctcaccaacctccactgaggagggcaccagcacagaaccaagcgagggctccgcacccggaacaagcactgaacccagtgagggttcagcacccggctctgagccggccacaagtggcagtgagacacccggcacttcagagagtgccacccccgagagtggcccaggcactagtaccgagccctctgaaggcagtgcgccagcctcgagcgaacaaaaactcatctcagaagaggatctgtcacctgcaaccggtcatcatcaccatcaccattga

SEQ ID NO: 1287 - protein, 2203 aa, synthetic construct
  REGION 1..2203: note = Description of Artificial Sequence: Synthetic polypeptide
ATRRYYLGAVELSWDYMQSDLGELPVDARFPPRVPKSFPFGAPGSSPSASTGTGPGSSPSASTGTGPGASPGTSSTGSPGASPGTSSTGSPGSSTPSGATGSPGSSPSASTGTGPGASPGTSSTGSPGSSPSASTGTGPGTPGSGTASSSPGSSTPSGATGSPGSSTPSGATGSPGASPGTSSTGSPASSNTSVVYKKTLFVEFTDHLFNIAKPRPPWMGLLGPTIQAEVYDTVVITLKNMASHPVSLHAVGVSYWKASEGAEYDDQTSQREKEDDKVFPGGSHTYVWQVLKENGPMASDPLCLTYSYLSHVDLVKDLNSGLIGALLVCREGSLAKEKTQTLHKFILLFAVFDEGKSWHSETKNSLMQDRDAASARAWPKMHTVNGYVNRSLPGLIGCHRKSVYWHVIGMGTTPEVHSIFLEGHTFLVRNHRQASLEISPITFLTAQTLLMDLGQFLLFCHISSHQHDGMEAYVKVDSCPEEPQLRMKNNEEAEDYDDDLTDSEMDVVRFDDDNSPSFIQIRSVAKKHPKTWVHYIAAEEEDWDYAPLVLAPDDRSYKSQYLNNGPQRIGRKYKKVRFMAYTDETFKTREAIQHESGILGPLLYGEVGDTLLIIFKNQASRPYNIYPHGITDVRPLYSRRLPKGVKHLKDFPILPGEIFKYKWTVTVEDGPTKSDPRCLTRYYSSFVNMERDLASGLIGPLLICYKESVDQRGNQIMSDKRNVILFSVFDENRSWYLTENIQRFLPNPAGVQLEDPEFQASNIMHSINGYVFDSLQLSVCLHEVAYWYILSIGAQTDFLSVFFSGYTFKHKMVYEDTLTLFPFSGETVFMSMENPGLWILGCHNSDFRNRGMTALLKVSSCDKNTGDYYEDSYEDISAYLLSKNNAIEPRSFSQNGAPSPAGSPTSTEEGTSESATPESGPGSEPATSGSETPGTSESATPESGPGTSTEPSEGSAPGTSTEPSEGSAPGTSTEPSEGSAPGTSTEPSEGSAPGTSTEPSEGSAPGTSTEPSEGSAPGSPAGSPTSTEEGTSTEPSEGSAPGASSPPVLKRHQAEITRTTLQSDQEEIDYDDTISVEMKKEDFDIYDEDENQSPRSFQKKTRHYFIAAVERLWDYGMSSSPHVLRNRAQSGSVPQFKKVVFQEFTDGSFTQPLYRGELNEHLGLLGPYIRAEVEDNIMVTFRNQASRPYSFYSSLISYEEDQRQGAEPRKNFVKPNETKTYFWKVQHHMAPTKDEFDCKAWAYFSDVDLEKDVHSGLIGPLLVCHTNTLNPAHGRQVTVQEFALFFTIFDETKSWYFTENMERNCRAPCNIQMEDPGAPGTPGSGTASSSPGASPGTSSTGSPGASPGTSSTGSPGASPGTSSTGSPGSSPSASTGTGPGTPGSGTASSSPGASPGTSSTGSPGASPGTSSTGSPGASPGTSSTGSPGSSTPSGATGSPGSSTPSGATGSPGASPGTSSTGSPASSTFKENYRFHAINGYIMDTLPGLVMAQDQRIRWYLLSMGSNENIHSIHFSGHVFTVRKKEEYKMALYNLYPGVFETVEMLPSKAGIWRVECLIGEHLHAGMSTLFLVYSNKCQTPLGMASGHIRDFQITASGQYGQWAPKLARLHYSGSINAWSTKEPFSWIKVDLLAPMIIHGIKTQGARQKFSSLYISQFIIMYSLDGKKWQTYRGNSTGTLMVFFGNVDSSGIKHNIFNPPIIARYIRLHPTHYSIRSTLRMELMGCDLNSCSMPLGMESKAISDAQITASSYFTNMFATWSPSKARLHLQGRSNAWRPQVNNPKEWLQVDFQKTMKVTGVTTQGVKSLLTSMYVKEFLISSSQDGHQWTLFFQNGKVKVFQGNQDSFTPVVNSLDPPLLTRYLRIHPQSWVHQIALRMEVLGCEAQDLYGAPGTSESATPESGPGSEPATSGSETPGTSESATPESGPGSEPATSGSETPGTSESATPESGPGTSTEPSEGSAPGSPAGSPTSTEEGTSESATPESGPGSEPATSGSETPGTSESATPESGPGSPAGSPTSTEEGSPAGSPTSTEEGTSTEPSEGSAPGTSESATPESGPGTSESATPESGPGTSESATPESGPGSEPATSGSETPGSEPATSGSETPGSPAGSPTSTEEGTSTEPSEGSAPGTSTEPSEGSAPGSEPATSGSETPGTSESATPESGPGTSTEPSEGSAPASSEQKLISEEDLSPATGHHHHHH

SEQ ID NO: 1288 - DNA, 6612 bp, synthetic construct
  misc_feature 1..6612: note = Description of Artificial Sequence: Synthetic polynucleotide
  source 1..6612: mol_type = other DNA
gccaccagaagatactacctgggtgcagtggaactgtcatgggactatatgcaaagtgatctcggtgagctgcctgtggacgcaagatttcctcctagagtgccaaaatcttttccattcggcgcgccaggctccagcccctccgcgagcacgggaaccggaccaggttcgtcaccctcagcatcaacggggacgggaccgggggcgtcaccaggaacgtcctccaccggctcgccgggtgcatcacccggaacgtcatcgaccggatcgccagggagctcgacgccatcaggcgcaacaggatcacctggctcaagccctagcgcgtcaaccggcacgggtccgggtgcctcccctggcacgtccagcaccggatcacccggatcgagcccatccgcctcaaccggaaccggacccggtacaccagggtcgggaacagcctcctcgtcaccaggctcctcaaccccctcgggagccacgggttcgcccggttcgtcaacgccttccggagcaactggtagccccggagcatcgccaggaacttcgagcacggggtcgcccgcctcgagcaacacctcagtcgtgtacaaaaagactctgtttgtagaattcacggatcaccttttcaacatcgctaagccaaggccaccctggatgggtctgctaggtcctaccatccaggctgaggtttatgatacagtggtcattacacttaagaacatggcttcccatcctgtcagtcttcatgctgttggtgtatcctactggaaagcttctgagggagctgaatatgatgatcagaccagtcaaagggagaaagaagatgataaagtcttccctggtggaagccatacatatgtctggcaggtcctgaaagagaatggtccaatggcctctgacccactgtgccttacctactcatatctttctcatgtggacctggtaaaagacttgaattcaggcctcattggagccctactagtatgtagagaagggagtctggccaaggaaaagacacagaccttgcacaaatttatactactttttgctgtatttgatgaagggaaaagttggcactcagaaacaaagaactccttgatgcaggatagggatgctgcatctgctcgggcctggcctaaaatgcacacagtcaatggttatgtaaacaggtctctgccaggtctgattggatgccacaggaaatcagtctattggcatgtgattggaatgggcaccactcctgaagtgcactcaatattcctcgaaggtcacacatttcttgtgaggaaccatcgccaggctagcttggaaatctcgccaataactttccttactgctcaaacactcttgatggaccttggacagtttctactgttttgtcatatctcttcccaccaacatgatggcatggaagcttatgtcaaagtagacagctgtccagaggaaccccaactacgaatgaaaaataatgaagaagcggaagactatgatgatgatcttactgattctgaaatggatgtggtcaggtttgatgatgacaactctccttcctttatccaaattcgctcagttgccaagaagcatcctaaaacttgggtacattacattgctgctgaagaggaggactgggactatgctcccttagtcctcgcccccgatgacagaagttataaaagtcaatatttgaacaatggccctcagcggattggtaggaagtacaaaaaagtccgatttatggcatacacagatgaaacctttaagactcgtgaagctattcagcatgaatcaggaatcttgggacctttactttatggggaagttggagacacactgttgattatatttaagaatcaagcaagcagaccatataacatctaccctcacggaatcactgatgtccgtcctttgtattcaaggagattaccaaaaggtgtaaaacatttgaaggattttccaattctgccaggagaaatattcaaatataaatggacagtgactgtagaagatgggccaactaaatcagatcctcggtgcctgacccgctattactctagtttcgttaatatggagagagatctagcttcaggactcattggccctctcctcatctgctacaaagaatctgtagatcaaagaggaaaccagataatgtcagacaagaggaatgtcatcctgttttctgtatttgatgagaaccgaagctggtacctcacagagaatatacaacgctttctccccaatccagctggagtgcagcttgaggatccagagttccaagcctccaacatcatgcacagcatcaatggctatgtttttgatagtttgcagttgtcagtttgtttgcatgaggtggcatactggtacattctaagcattggagcacagactgacttcctttctgtcttcttctctggatataccttcaaacacaaaatggtctatgaagacacactcaccctattcccattctcaggagaaactgtcttcatgtcgatggaaaacccaggtctatggattctggggtgccacaactcagactttcggaacagaggcatgaccgccttactgaaggtttctagttgtgacaagaacactggtgattattacgaggacagttatgaagatatttcagcatacttgctgagtaaaaacaatgccattgaaccaagaagcttctctcaaaacggcgcgccaagtcccgctggaagcccaactagcaccgaagaggggacctcagagtccgccacccccgagtccggccctggctctgagcctgccactagcggctccgagactcctggcacatccgaaagcgctacacccgagagtggacccggcacctctaccgagcccagtgagggctccgcccctggaacaagcaccgagcccagcgaaggcagcgccccagggacctccacagagcccagtgaaggcagtgctcctggcaccagcaccgaaccaagcgagggctctgcacccgggacctccaccgagccaagcgaaggctctgcccctggcacttccaccgagcccagcgaaggcagcgcccctgggagccccgctggctctcccaccagcactgaggagggcacatctaccgaaccaagtgaaggctctgcaccaggtgcctcgagcccaccagtcttgaaacgccatcaagctgaaataactcgtactactcttcagtcagatcaagaggaaatcgattatgatgataccatatcagttgaaatgaagaaggaagattttgacatttatgatgaggatgaaaatcagagcccccgcagctttcaaaagaaaacacgacactattttattgctgcagtggagaggctctgggattatgggatgagtagctccccacatgttctaagaaacagggctcagagtggcagtgtccctcagttcaagaaagttgttttccaggaatttactgatggctcctttactcagcccttataccgtggagaactaaatgaacatttgggactcctggggccatatataagagcagaagttgaagataatatcatggtaactttcagaaatcaggcctctcgtccctattccttctattctagccttatttcttatgaggaagatcagaggcaaggagcagaacctagaaaaaactttgtcaagcctaatgaaaccaaaacttacttttggaaagtgcaacatcatatggcacccactaaagatgagtttgactgcaaagcctgggcttatttctctgatgttgacctggaaaaagatgtgcactcaggcctgattggaccccttctggtctgccacactaacacactgaaccctgctcatgggagacaagtgacagtacaggaatttgctctgtttttcaccatctttgatgagaccaaaagctggtacttcactgaaaatatggaaagaaactgcagggctccctgcaatatccagatggaagatcccggcgcgccaggtacacccggatcgggtacagcgtcatcgagccccggtgcgtcacctggtacgtcgagcacggggtcgccaggggcgtcccctgggacgtcctcaacaggctcgcccggtgcgtcacccggcacgtcgtccacgggttcacctggtagctccccttccgcgtccactggcaccgggcctggaactccggggagcggcacagcgagctcgtcgccgggagcatcgcctgggacatcgagcaccgggtcgccaggagcatcgcccggaacatccagcacaggaagccccggcgcgtcgcccgggacatcaagcacaggttccccgggatcgagcacgccgtccggagccactggatcaccagggagctcgacaccttccggcgcaacgggatcgcccggagccagcccgggtacgtcaagcactggctcccctgcctcgagcacttttaaagagaattatcgcttccatgcaatcaatggctacataatggatacactacctggcttagtaatggctcaggatcaaaggattcgatggtatctgctcagcatgggcagcaatgaaaacatccattctattcatttcagtggacatgtgttcactgtacgaaaaaaagaggagtataaaatggcactgtacaatctctatccaggtgtttttgagacagtggaaatgttaccatccaaagctggaatttggcgggtggaatgccttattggcgagcatctacatgctgggatgagcacactttttctggtgtacagcaataagtgtcagactcccctgggaatggcttctggacacattagagattttcagattacagcttcaggacaatatggacagtgggccccaaagctggccagacttcattattccggatcaatcaatgcctggagcaccaaggagcccttttcttggatcaaggtggatctgttggcaccaatgattattcacggcatcaagacccagggtgcccgtcagaagttctccagcctctacatctctcagtttatcatcatgtatagtcttgatgggaagaagtggcagacttatcgaggaaattccactggaaccttaatggtcttctttggcaatgtggattcatctgggataaaacacaatatttttaaccctccaattattgctcgatacatccgtttgcacccaactcattatagcattcgcagcactcttcgcatggagttgatgggctgtgatttaaatagttgcagcatgccattgggaatggagagtaaagcaatatcagatgcacagattactgcttcatcctactttaccaatatgtttgccacctggtctccttcaaaagctcgacttcacctccaagggaggagtaatgcctggagacctcaggtgaataatccaaaagagtggctgcaagtggacttccagaagacaatgaaagtcacaggagtaactactcagggagtaaaatctctgcttaccagcatgtatgtgaaggagttcctcatctccagcagtcaagatggccatcagtggactctcttttttcagaatggcaaagtaaaggtttttcagggaaatcaagactccttcacacctgtggtgaactctctagacccaccgttactgactcgctaccttcgaattcacccccagagttgggtgcaccagattgccctgaggatggaggttctgggctgcgaggcacaggacctctacggcgcgccaggtacctcagagtctgctacccccgagtcagggccaggatcagagccagccacctccgggtctgagacacccgggacttccgagagtgccacccctgagtccggacccgggtccgagcccgccacttccggctccgaaactcccggcacaagcgagagcgctaccccagagtcaggaccaggaacatctacagagccctctgaaggctccgctccagggtccccagccggcagtcccactagcaccgaggagggaacctctgaaagcgccacacccgaatcagggccagggtctgagcctgctaccagcggcagcgagacaccaggcacctctgagtccgccacaccagagtccggacccggatctcccgctgggagccccacctccactgaggagggatctcctgctggctctccaacatctactgaggaaggtacctcaaccgagccatccgagggatcagctcccggcacctcagagtcggcaaccccggagtctggacccggaacttccgaaagtgccacaccagagtccggtcccgggacttcagaatcagcaacacccgagtccggccctgggtctgaacccgccacaagtggtagtgagacaccaggatcagaacctgctacctcagggtcagagacacccggatctccggcaggctcaccaacctccactgaggagggcaccagcacagaaccaagcgagggctccgcacccggaacaagcactgaacccagtgagggttcagcacccggctctgagccggccacaagtggcagtgagacacccggcacttcagagagtgccacccccgagagtggcccaggcactagtaccgagccctctgaaggcagtgcgccagcctcgagcgaacaaaaactcatctcagaagaggatctgtcacctgcaaccggtcatcatcaccatcaccattga

SEQ ID NO: 1289 - protein, 2203 aa, synthetic construct
  REGION 1..2203: note = Description of Artificial Sequence: Synthetic polypeptide
ATRRYYLGAVELSWDYMQGAPGSSPSASTGTGPGSSPSASTGTGPGASPGTSSTGSPGASPGTSSTGSPGSSTPSGATGSPGSSPSASTGTGPGASPGTSSTGSPGSSPSASTGTGPGTPGSGTASSSPGSSTPSGATGSPGSSTPSGATGSPGASPGTSSTGSPASSSDLGELPVDARFPPRVPKSFPFNTSVVYKKTLFVEFTDHLFNIAKPRPPWMGLLGPTIQAEVYDTVVITLKNMASHPVSLHAVGVSYWKASEGAEYDDQTSQREKEDDKVFPGGSHTYVWQVLKENGPMASDPLCLTYSYLSHVDLVKDLNSGLIGALLVCREGSLAKEKTQTLHKFILLFAVFDEGKSWHSETKNSLMQDRDAASARAWPKMHTVNGYVNRSLPGLIGCHRKSVYWHVIGMGTTPEVHSIFLEGHTFLVRNHRQASLEISPITFLTAQTLLMDLGQFLLFCHISSHQHDGMEAYVKVDSCPEEPQLRMKNNEEAEDYDDDLTDSEMDVVRFDDDNSPSFIQIRSVAKKHPKTWVHYIAAEEEDWDYAPLVLAPDDRSYKSQYLNNGPQRIGRKYKKVRFMAYTDETFKTREAIQHESGILGPLLYGEVGDTLLIIFKNQASRPYNIYPHGITDVRPLYSRRLPKGVKHLKDFPILPGEIFKYKWTVTVEDGPTKSDPRCLTRYYSSFVNMERDLASGLIGPLLICYKESVDQRGNQIMSDKRNVILFSVFDENRSWYLTENIQRFLPNPAGVQLEDPEFQASNIMHSINGYVFDSLQLSVCLHEVAYWYILSIGAQTDFLSVFFSGYTFKHKMVYEDTLTLFPFSGETVFMSMENPGLWILGCHNSDFRNRGMTALLKVSSCDKNTGDYYEDSYEDISAYLLSKNNAIEPRSFSQNGAPSPAGSPTSTEEGTSESATPESGPGSEPATSGSETPGTSESATPESGPGTSTEPSEGSAPGTSTEPSEGSAPGTSTEPSEGSAPGTSTEPSEGSAPGTSTEPSEGSAPGTSTEPSEGSAPGSPAGSPTSTEEGTSTEPSEGSAPGASSPPVLKRHQAEITRTTLQSDQEEIDYDDTISVEMKKEDFDIYDEDENQSPRSFQKKTRHYFIAAVERLWDYGMSSSPHVLRNRAQSGSVPQFKKVVFQEFTDGSFTQPLYRGELNEHLGLLGPYIRAEVEDNIMVTFRNQASRPYSFYSSLISYEEDQRQGAEPRKNFVKPNETKTYFWKVQHHMAPTKDEFDCKAWAYFSDVDLEKDVHSGLIGPLLVCHTNTLNPAHGRQVTVQEFALFFTIFDETKSWYFTENMERNCRAPCNIQMEDPGAPGTPGSGTASSSPGASPGTSSTGSPGASPGTSSTGSPGASPGTSSTGSPGSSPSASTGTGPGTPGSGTASSSPGASPGTSSTGSPGASPGTSSTGSPGASPGTSSTGSPGSSTPSGATGSPGSSTPSGATGSPGASPGTSSTGSPASSTFKENYRFHAINGYIMDTLPGLVMAQDQRIRWYLLSMGSNENIHSIHFSGHVFTVRKKEEYKMALYNLYPGVFETVEMLPSKAGIWRVECLIGEHLHAGMSTLFLVYSNKCQTPLGMASGHIRDFQITASGQYGQWAPKLARLHYSGSINAWSTKEPFSWIKVDLLAPMIIHGIKTQGARQKFSSLYISQFIIMYSLDGKKWQTYRGNSTGTLMVFFGNVDSSGIKHNIFNPPIIARYIRLHPTHYSIRSTLRMELMGCDLNSCSMPLGMESKAISDAQITASSYFTNMFATWSPSKARLHLQGRSNAWRPQVNNPKEWLQVDFQKTMKVTGVTTQGVKSLLTSMYVKEFLISSSQDGHQWTLFFQNGKVKVFQGNQDSFTPVVNSLDPPLLTRYLRIHPQSWVHQIALRMEVLGCEAQDLYGAPGTSESATPESGPGSEPATSGSETPGTSESATPESGPGSEPATSGSETPGTSESATPESGPGTSTEPSEGSAPGSPAGSPTSTEEGTSESATPESGPGSEPATSGSETPGTSESATPESGPGSPAGSPTSTEEGSPAGSPTSTEEGTSTEPSEGSAPGTSESATPESGPGTSESATPESGPGTSESATPESGPGSEPATSGSETPGSEPATSGSETPGSPAGSPTSTEEGTSTEPSEGSAPGTSTEPSEGSAPGSEPATSGSETPGTSESATPESGPGTSTEPSEGSAPASSEQKLISEEDLSPATGHHHHHH

SEQ ID NO: 1290 - DNA, 6612 bp, synthetic construct
  misc_feature 1..6612: note = Description of Artificial Sequence: Synthetic polynucleotide
  source 1..6612: mol_type = other DNA
gccaccagaagatactacctgggtgcagtggaactgtcatgggactatatgcaaggcgcgccaggctccagcccctccgcgagcacgggaaccggaccaggttcgtcaccctcagcatcaacggggacgggaccgggggcgtcaccaggaacgtcctccaccggctcgccgggtgcatcacccggaacgtcatcgaccggatcgccagggagctcgacgccatcaggcgcaacaggatcacctggctcaagccctagcgcgtcaaccggcacgggtccgggtgcctcccctggcacgtccagcaccggatcacccggatcgagcccatccgcctcaaccggaaccggacccggtacaccagggtcgggaacagcctcctcgtcaccaggctcctcaaccccctcgggagccacgggttcgcccggttcgtcaacgccttccggagcaactggtagccccggagcatcgccaggaacttcgagcacggggtcgcccgcctcgagcagtgatctcggtgagctgcctgtggacgcaagatttcctcctagagtgccaaaatcttttccattcaacacctcagtcgtgtacaaaaagactctgtttgtagaattcacggatcaccttttcaacatcgctaagccaaggccaccctggatgggtctgctaggtcctaccatccaggctgaggtttatgatacagtggtcattacacttaagaacatggcttcccatcctgtcagtcttcatgctgttggtgtatcctactggaaagcttctgagggagctgaatatgatgatcagaccagtcaaagggagaaagaagatgataaagtcttccctggtggaagccatacatatgtctggcaggtcctgaaagagaatggtccaatggcctctgacccactgtgccttacctactcatatctttctcatgtggacctggtaaaagacttgaattcaggcctcattggagccctactagtatgtagagaagggagtctggccaaggaaaagacacagaccttgcacaaatttatactactttttgctgtatttgatgaagggaaaagttggcactcagaaacaaagaactccttgatgcaggatagggatgctgcatctgctcgggcctggcctaaaatgcacacagtcaatggttatgtaaacaggtctctgccaggtctgattggatgccacaggaaatcagtctattggcatgtgattggaatgggcaccactcctgaagtgcactcaatattcctcgaaggtcacacatttcttgtgaggaaccatcgccaggctagcttggaaatctcgccaataactttccttactgctcaaacactcttgatggaccttggacagtttctactgttttgtcatatctcttcccaccaacatgatggcatggaagcttatgtcaaagtagacagctgtccagaggaaccccaactacgaatgaaaaataatgaagaagcggaagactatgatgatgatcttactgattctgaaatggatgtggtcaggtttgatgatgacaactctccttcctttatccaaattcgctcagttgccaagaagcatcctaaaacttgggtacattacattgctgctgaagaggaggactgggactatgctcccttagtcctcgcccccgatgacagaagttataaaagtcaatatttgaacaatggccctcagcggattggtaggaagtacaaaaaagtccgatttatggcatacacagatgaaacctttaagactcgtgaagctattcagcatgaatcaggaatcttgggacctttactttatggggaagttggagacacactgttgattatatttaagaatcaagcaagcagaccatataacatctaccctcacggaatcactgatgtccgtcctttgtattcaaggagattaccaaaaggtgtaaaacatttgaaggattttccaattctgccaggagaaatattcaaatataaatggacagtgactgtagaagatgggccaactaaatcagatcctcggtgcctgacccgctattactctagtttcgttaatatggagagagatctagcttcaggactcattggccctctcctcatctgctacaaagaatctgtagatcaaagaggaaaccagataatgtcagacaagaggaatgtcatcctgttttctgtatttgatgagaaccgaagctggtacctcacagagaatatacaacgctttctccccaatccagctggagtgcagcttgaggatccagagttccaagcctccaacatcatgcacagcatcaatggctatgtttttgatagtttgcagttgtcagtttgtttgcatgaggtggcatactggtacattctaagcattggagcacagactgacttcctttctgtcttcttctctggatataccttcaaacacaaaatggtctatgaagacacactcaccctattcccattctcaggagaaactgtcttcatgtcgatggaaaacccaggtctatggattctggggtgccacaactcagactttcggaacagaggcatgaccgccttactgaaggtttctagttgtgacaagaacactggtgattattacgaggacagttatgaagatatttcagcatacttgctgagtaaaaacaatgccattgaaccaagaagcttctctcaaaacggcgcgccaagtcccgctggaagcccaactagcaccgaagaggggacctcagagtccgccacccccgagtccggccctggctctgagcctgccactagcggctccgagactcctggcacatccgaaagcgctacacccgagagtggacccggcacctctaccgagcccagtgagggctccgcccctggaacaagcaccgagcccagcgaaggcagcgccccagggacctccacagagcccagtgaaggcagtgctcctggcaccagcaccgaaccaagcgagggctctgcacccgggacctccaccgagccaagcgaaggctctgcccctggcacttccaccgagcccagcgaaggcagcgcccctgggagccccgctggctctcccaccagcactgaggagggcacatctaccgaaccaagtgaaggctctgcaccaggtgcctcgagcccaccagtcttgaaacgccatcaagctgaaataactcgtactactcttcagtcagatcaagaggaaatcgattatgatgataccatatcagttgaaatgaagaaggaagattttgacatttatgatgaggatgaaaatcagagcccccgcagctttcaaaagaaaacacgacactattttattgctgcagtggagaggctctgggattatgggatgagtagctccccacatgttctaagaaacagggctcagagtggcagtgtccctcagttcaagaaagttgttttccaggaatttactgatggctcctttactcagcccttataccgtggagaactaaatgaacatttgggactcctggggccatatataagagcagaagttgaagataatatcatggtaactttcagaaatcaggcctctcgtccctattccttctattctagccttatttcttatgaggaagatcagaggcaaggagcagaacctagaaaaaactttgtcaagcctaatgaaaccaaaacttacttttggaaagtgcaacatcatatggcacccactaaagatgagtttgactgcaaagcctgggcttatttctctgatgttgacctggaaaaagatgtgcactcaggcctgattggaccccttctggtctgccacactaacacactgaaccctgctcatgggagacaagtgacagtacaggaatttgctctgtttttcaccatctttgatgagaccaaaagctggtacttcactgaaaatatggaaagaaactgcagggctccctgcaatatccagatggaagatcccggcgcgccaggtacacccggatcgggtacagcgtcatcgagccccggtgcgtcacctggtacgtcgagcacggggtcgccaggggcgtcccctgggacgtcctcaacaggctcgcccggtgcgtcacccggcacgtcgtccacgggttcacctggtagctccccttccgcgtccactggcaccgggcctggaactccggggagcggcacagcgagctcgtcgccgggagcatcgcctgggacatcgagcaccgggtcgccaggagcatcgcccggaacatccagcacaggaagccccggcgcgtcgcccgggacatcaagcacaggttccccgggatcgagcacgccgtccggagccactggatcaccagggagctcgacaccttccggcgcaacgggatcgcccggagccagcccgggtacgtcaagcactggctcccctgcctcgagcacttttaaagagaattatcgcttccatgcaatcaatggctacataatggatacactacctggcttagtaatggctcaggatcaaaggattcgatggtatctgctcagcatgggcagcaatgaaaacatccattctattcatttcagtggacatgtgttcactgtacgaaaaaaagaggagtataaaatggcactgtacaatctctatccaggtgtttttgagacagtggaaatgttaccatccaaagctggaatttggcgggtggaatgccttattggcgagcatctacatgctgggatgagcacactttttctggtgtacagcaataagtgtcagactcccctgggaatggcttctggacacattagagattttcagattacagcttcaggacaatatggacagtgggccccaaagctggccagacttcattattccggatcaatcaatgcctggagcaccaaggagcccttttcttggatcaaggtggatctgttggcaccaatgattattcacggcatcaagacccagggtgcccgtcagaagttctccagcctctacatctctcagtttatcatcatgtatagtcttgatgggaagaagtggcagacttatcgaggaaattccactggaaccttaatggtcttctttggcaatgtggattcatctgggataaaacacaatatttttaaccctccaattattgctcgatacatccgtttgcacccaactcattatagcattcgcagcactcttcgcatggagttgatgggctgtgatttaaatagttgcagcatgccattgggaatggagagtaaagcaatatcagatgcacagattactgcttcatcctactttaccaatatgtttgccacctggtctccttcaaaagctcgacttcacctccaagggaggagtaatgcctggagacctcaggtgaataatccaaaagagtggctgcaagtggacttccagaagacaatgaaagtcacaggagtaactactcagggagtaaaatctctgcttaccagcatgtatgtgaaggagttcctcatctccagcagtcaagatggccatcagtggactctcttttttcagaatggcaaagtaaaggtttttcagggaaatcaagactccttcacacctgtggtgaactctctagacccaccgttactgactcgctaccttcgaattcacccccagagttgggtgcaccagattgccctgaggatggaggttctgggctgcgaggcacaggacctctacggcgcgccaggtacctcagagtctgctacccccgagtcagggccaggatcagagccagccacctccgggtctgagacacccgggacttccgagagtgccacccctgagtccggacccgggtccgagcccgccacttccggctccgaaactcccggcacaagcgagagcgctaccccagagtcaggaccaggaacatctacagagccctctgaaggctccgctccagggtccccagccggcagtcccactagcaccgaggagggaacctctgaaagcgccacacccgaatcagggccagggtctgagcctgctaccagcggcagcgagacaccaggcacctctgagtccgccacaccagagtccggacccggatctcccgctgggagccccacctccactgaggagggatctcctgctggctctccaacatctactgaggaaggtacctcaaccgagccatccgagggatcagctcccggcacctcagagtcggcaaccccggagtctggacccggaacttccgaaagtgccacaccagagtccggtcccgggacttcagaatcagcaacacccgagtccggccctgggtctgaacccgccacaagtggtagtgagacaccaggatcagaacctgctacctcagggtcagagacacccggatctccggcaggctcaccaacctccactgaggagggcaccagcacagaaccaagcgagggctccgcacccggaacaagcactgaacccagtgagggttcagcacccggctctgagccggccacaagtggcagtgagacacccggcacttcagagagtgccacccccgagagtggcccaggcactagtaccgagccctctgaaggcagtgcgccagcctcgagcgaacaaaaactcatctcagaagaggatctgtcacctgcaaccggtcatcatcaccatcaccattga

SEQ ID NO: 1291 - protein, 2206 aa, synthetic construct
  REGION 1..2206: note = Description of Artificial Sequence: Synthetic polypeptide
ATRRYYLGAVELSWDYMQSDLGELPVDARFPPRVPKSFPFNTSVVYKKTLFVEFTDHLFNIAKPRPPWMGLLGPTIQAEVYDTVVITLKNMASHPVSLHAVGVSYWKASEGAEYDDQTSQREKEDDKVFPGGSHTYVWQVLKENGPMASDPLCLTYSYLSHVDLVKDLNSGLIGALLVCREGSLAKEKTQTLHKFILLFAVFDEGKSWHSETKNSLMQDRDAASARAWPKMHTVNGYVNRSLPGLIGCHRKSVYWHVIGMGTTPEVHSIFLEGHTFLVRNHRQASLEISPITFLTAQTLLMDLGQFLLFCHISSHQHDGMEAYVKVDSCPEEPQLRMKNNEEAEDYDDDLTDSEMDVVRFDDDNSPSFIQIRSVAKKHPKTWVHYIAAEEEDWDYAPLVLAPDDRSYKSGAPTSTEPSEGSAPGSPAGSPTSTEEGTSTEPSEGSAPGTSTEPSEGSAPGTSESATPESGPGTSTEPSEGSAPGTSESATPESGPGSEPATSGSETPGTSTEPSEGSAPGTSTEPSEGSAPGTSESATPESGPGTSESATPESGPGASSQYLNNGPQRIGRKYKKVRFMAYTDETFKTREAIQHESGILGPLLYGEVGDTLLIIFKNQASRPYNIYPHGITDVRPLYSRRLPKGVKHLKDFPILPGEIFKYKWTVTVEDGPTKSDPRCLTRYYSSFVNMERDLASGLIGPLLICYKESVDQRGNQIMSDKRNVILFSVFDENRSWYLTENIQRFLPNPAGVQLEDPEFQASNIMHSINGYVFDSLQLSVCLHEVAYWYILSIGAQTDFLSVFFSGYTFKHKMVYEDTLTLFPFSGETVFMSMENPGLWILGCHNSDFRNRGMTALLKVSSCDKNTGDYYEDSYEDISAYLLSKNNAIEPRSFSQNGAPSPAGSPTSTEEGTSESATPESGPGSEPATSGSETPGTSESATPESGPGTSTEPSEGSAPGTSTEPSEGSAPGTSTEPSEGSAPGTSTEPSEGSAPGTSTEPSEGSAPGTSTEPSEGSAPGSPAGSPTSTEEGTSTEPSEGSAPGASSPPVLKRHQAEITRTTLQSDQEEIDYDDTISVEMKKEDFDIYDEDENQSPRSFQKKTRHYFIAAVERLWDYGMSSSPHVLRNRAQGAPTSESATPESGPGSEPATSGSETPGTSESATPESGPGSEPATSGSETPGTSESATPESGPGTSTEPSEGSAPGTSESATPESGPGSPAGSPTSTEEGSPAGSPTSTEEGSPAGSPTSTEEGTSESATPESGPGTSTEPSEGSAPGASSRAQSGSVPQFKKVVFQEFTDGSFTQPLYRGELNEHLGLLGPYIRAEVEDNIMVTFRNQASRPYSFYSSLISYEEDQRQGAEPRKNFVKPNETKTYFWKVQHHMAPTKDEFDCKAWAYFSDVDLEKDVHSGLIGPLLVCHTNTLNPAHGRQVTVQEFALFFTIFDETKSWYFTENMERNCRAPCNIQMEDPTFKENYRFHAINGYIMDTLPGLVMAQDQRIRWYLLSMGSNENIHSIHFSGHVFTVRKKEEYKMALYNLYPGVFETVEMLPSKAGIWRVECLIGEHLHAGMSTLFLVYSNKCQTPLGMASGHIRDFQITASGQYGQWAPKLARLHYSGSINAWSTKEPFSWIKVDLLAPMIIHGIKTQGARQKFSSLYISQFIIMYSLDGKKWQTYRGNSTGTLMVFFGNVDSSGIKHNIFNPPIIARYIRLHPTHYSIRSTLRMELMGCDLNSCSMPLGMESKAISDAQITASSYFTNMFATWSPSKARLHLQGRSNAWRPQVNNPKEWLQVDFQKTMKVTGVTTQGVKSLLTSMYVKEFLISSSQDGHQWTLFFQNGKVKVFQGNQDSFTPVVNSLDPPLLTRYLRIHPQSWVHQIALRMEVLGCEAQDLYGAPGTSESATPESGPGSEPATSGSETPGTSESATPESGPGSEPATSGSETPGTSESATPESGPGTSTEPSEGSAPGSPAGSPTSTEEGTSESATPESGPGSEPATSGSETPGTSESATPESGPGSPAGSPTSTEEGSPAGSPTSTEEGTSTEPSEGSAPGTSESATPESGPGTSESATPESGPGTSESATPESGPGSEPATSGSETPGSEPATSGSETPGSPAGSPTSTEEGTSTEPSEGSAPGTSTEPSEGSAPGSEPATSGSETPGTSESATPESGPGTSTEPSEGSAPASSEQKLISEEDLSPATGHHHHHH

SEQ ID NO: 1292 - DNA, 6621 bp, synthetic construct
  misc_feature 1..6621: note = Description of Artificial Sequence: Synthetic polynucleotide
  source 1..6621: mol_type = other DNA
gccaccagaagatactacctgggtgcagtggaactgtcatgggactatatgcaaagtgatctcggtgagctgcctgtggacgcaagatttcctcctagagtgccaaaatcttttccattcaacacctcagtcgtgtacaaaaagactctgtttgtagaattcacggatcaccttttcaacatcgctaagccaaggccaccctggatgggtctgctaggtcctaccatccaggctgaggtttatgatacagtggtcattacacttaagaacatggcttcccatcctgtcagtcttcatgctgttggtgtatcctactggaaagcttctgagggagctgaatatgatgatcagaccagtcaaagggagaaagaagatgataaagtcttccctggtggaagccatacatatgtctggcaggtcctgaaagagaatggtccaatggcctctgacccactgtgccttacctactcatatctttctcatgtggacctggtaaaagacttgaattcaggcctcattggagccctactagtatgtagagaagggagtctggccaaggaaaagacacagaccttgcacaaatttatactactttttgctgtatttgatgaagggaaaagttggcactcagaaacaaagaactccttgatgcaggatagggatgctgcatctgctcgggcctggcctaaaatgcacacagtcaatggttatgtaaacaggtctctgccaggtctgattggatgccacaggaaatcagtctattggcatgtgattggaatgggcaccactcctgaagtgcactcaatattcctcgaaggtcacacatttcttgtgaggaaccatcgccaggctagcttggaaatctcgccaataactttccttactgctcaaacactcttgatggaccttggacagtttctactgttttgtcatatctcttcccaccaacatgatggcatggaagcttatgtcaaagtagacagctgtccagaggaaccccaactacgaatgaaaaataatgaagaagcggaagactatgatgatgatcttactgattctgaaatggatgtggtcaggtttgatgatgacaactctccttcctttatccaaattcgctcagttgccaagaagcatcctaaaacttgggtacattacattgctgctgaagaggaggactgggactatgctcccttagtcctcgcccccgatgacagaagttataaaagtggcgcgccaaccagtacggagccgtccgaggggagcgcaccaggaagcccggctgggagcccgacttctaccgaagagggtacatctaccgaaccaagtgaaggttcagcaccaggcacctcaacagaaccctctgagggctcggcgcctggtacaagtgagtccgccaccccagaatccgggcctgggacaagcacagaaccttcggaagggagtgcccctggaacatccgaatcggcaaccccagaatcagggccaggatctgagcccgcgacttcgggctccgagacgcctgggacatccaccgagccctccgaaggatcagccccaggcaccagcacggagccctctgagggaagcgcacctggtaccagcgaaagcgcaactcccgaatcaggtcccggtacgagcgagtcggcgaccccggagagcgggccaggtgcctcgagccaatatttgaacaatggccctcagcggattggtaggaagtacaaaaaagtccgatttatggcatacacagatgaaacctttaagactcgtgaagctattcagcatgaatcaggaatcttgggacctttactttatggggaagttggagacacactgttgattatatttaagaatcaagcaagcagaccatataacatctaccctcacggaatcactgatgtccgtcctttgtattcaaggagattaccaaaaggtgtaaaacatttgaaggattttccaattctgccaggagaaatattcaaatataaatggacagtgactgtagaagatgggccaactaaatcagatcctcggtgcctgacccgctattactctagtttcgttaatatggagagagatctagcttcaggactcattggccctctcctcatctgctacaaagaatctgtagatcaaagaggaaaccagataatgtcagacaagaggaatgtcatcctgttttctgtatttgatgagaaccgaagctggtacctcacagagaatatacaacgctttctccccaatccagctggagtgcagcttgaggatccagagttccaagcctccaacatcatgcacagcatcaatggctatgtttttgatagtttgcagttgtcagtttgtttgcatgaggtggcatactggtacattctaagcattggagcacagactgacttcctttctgtcttcttctctggatataccttcaaacacaaaatggtctatgaagacacactcaccctattcccattctcaggagaaactgtcttcatgtcgatggaaaacccaggtctatggattctggggtgccacaactcagactttcggaacagaggcatgaccgccttactgaaggtttctagttgtgacaagaacactggtgattattacgaggacagttatgaagatatttcagcatacttgctgagtaaaaacaatgccattgaaccaagaagcttctctcaaaacggcgcgccaagtcccgctggaagcccaactagcaccgaagaggggacctcagagtccgccacccccgagtccggccctggctctgagcctgccactagcggctccgagactcctggcacatccgaaagcgctacacccgagagtggacccggcacctctaccgagcccagtgagggctccgcccctggaacaagcaccgagcccagcgaaggcagcgccccagggacctccacagagcccagtgaaggcagtgctcctggcaccagcaccgaaccaagcgagggctctgcacccgggacctccaccgagccaagcgaaggctctgcccctggcacttccaccgagcccagcgaaggcagcgcccctgggagccccgctggctctcccaccagcactgaggagggcacatctaccgaaccaagtgaaggctctgcaccaggtgcctcgagcccaccagtcttgaaacgccatcaagctgaaataactcgtactactcttcagtcagatcaagaggaaatcgattatgatgataccatatcagttgaaatgaagaaggaagattttgacatttatgatgaggatgaaaatcagagcccccgcagctttcaaaagaaaacacgacactattttattgctgcagtggagaggctctgggattatgggatgagtagctccccacatgttctaagaaacagggctcagggcgcgccaacgtccgaaagtgctacccctgagtcaggccctggtagtgagcctgccacaagcggaagcgaaactccggggacctcagagtctgccactcccgaatcggggccaggctctgaaccggccacttcagggagcgaaacaccaggaacatcggagagcgctaccccggagagcgggccaggaactagtactgagcctagcgagggaagtgcacctggtacaagcgagtccgccacacccgagtctggccctggctctccagcgggctcacccacgagcactgaagagggctctcccgctggcagcccaacgtcgacagaagaaggatcaccagcaggctcccccacatcaacagaggagggtacatcagaatctgctactcccgagagtggacccggtacctccactgagcccagcgaggggagtgcaccaggtgcctcgagcagggctcagagtggcagtgtccctcagttcaagaaagttgttttccaggaatttactgatggctcctttactcagcccttataccgtggagaactaaatgaacatttgggactcctggggccatatataagagcagaagttgaagataatatcatggtaactttcagaaatcaggcctctcgtccctattccttctattctagccttatttcttatgaggaagatcagaggcaaggagcagaacctagaaaaaactttgtcaagcctaatgaaaccaaaacttacttttggaaagtgcaacatcatatggcacccactaaagatgagtttgactgcaaagcctgggcttatttctctgatgttgacctggaaaaagatgtgcactcaggcctgattggaccccttctggtctgccacactaacacactgaaccctgctcatgggagacaagtgacagtacaggaatttgctctgtttttcaccatctttgatgagaccaaaagctggtacttcactgaaaatatggaaagaaactgcagggctccctgcaatatccagatggaagatcccacttttaaagagaattatcgcttccatgcaatcaatggctacataatggatacactacctggcttagtaatggctcaggatcaaaggattcgatggtatctgctcagcatgggcagcaatgaaaacatccattctattcatttcagtggacatgtgttcactgtacgaaaaaaagaggagtataaaatggcactgtacaatctctatccaggtgtttttgagacagtggaaatgttaccatccaaagctggaatttggcgggtggaatgccttattggcgagcatctacatgctgggatgagcacactttttctggtgtacagcaataagtgtcagactcccctgggaatggcttctggacacattagagattttcagattacagcttcaggacaatatggacagtgggccccaaagctggccagacttcattattccggatcaatcaatgcctggagcaccaaggagcccttttcttggatcaaggtggatctgttggcaccaatgattattcacggcatcaagacccagggtgcccgtcagaagttctccagcctctacatctctcagtttatcatcatgtatagtcttgatgggaagaagtggcagacttatcgaggaaattccactggaaccttaatggtcttctttggcaatgtggattcatctgggataaaacacaatatttttaaccctccaattattgctcgatacatccgtttgcacccaactcattatagcattcgcagcactcttcgcatggagttgatgggctgtgatttaaatagttgcagcatgccattgggaatggagagtaaagcaatatcagatgcacagattactgcttcatcctactttaccaatatgtttgccacctggtctccttcaaaagctcgacttcacctccaagggaggagtaatgcctggagacctcaggtgaataatccaaaagagtggctgcaagtggacttccagaagacaatgaaagtcacaggagtaactactcagggagtaaaatctctgcttaccagcatgtatgtgaaggagttcctcatctccagcagtcaagatggccatcagtggactctcttttttcagaatggcaaagtaaaggtttttcagggaaatcaagactccttcacacctgtggtgaactctctagacccaccgttactgactcgctaccttcgaattcacccccagagttgggtgcaccagattgccctgaggatggaggttctgggctgcgaggcacaggacctctacggcgcgccaggtacctcagagtctgctacccccgagtcagggccaggatcagagccagccacctccgggtctgagacacccgggacttccgagagtgccacccctgagtccggacccgggtccgagcccgccacttccggctccgaaactcccggcacaagcgagagcgctaccccagagtcaggaccaggaacatctacagagccctctgaaggctccgctccagggtccccagccggcagtcccactagcaccgaggagggaacctctgaaagcgccacacccgaatcagggccagggtctgagcctgctaccagcggcagcgagacaccaggcacctctgagtccgccacaccagagtccggacccggatctcccgctgggagccccacctccactgaggagggatctcctgctggctctccaacatctactgaggaaggtacctcaaccgagccatccgagggatcagctcccggcacctcagagtcggcaaccccggagtctggacccggaacttccgaaagtgccacaccagagtccggtcccgggacttcagaatcagcaacacccgagtccggccctgggtctgaacccgccacaagtggtagtgagacaccaggatcagaacctgctacctcagggtcagagacacccggatctccggcaggctcaccaacctccactgaggagggcaccagcacagaaccaagcgagggctccgcacccggaacaagcactgaacccagtgagggttcagcacccggctctgagccggccacaagtggcagtgagacacccggcacttcagagagtgccacccccgagagtggcccaggcactagtaccgagccctctgaaggcagtgcgccagcctcgagcgaacaaaaactcatctcagaagaggatctgtcacctgcaaccggtcatcatcaccatcaccattga

SEQ ID NO: 1293 - protein, 2206 aa, synthetic construct
  REGION 1..2206: note = Description of Artificial Sequence: Synthetic polypeptide
ATRRYYLGAVELSWDYMQSDLGELPVDARFPPRVPKSFPFNTSVVYKKTLFVEFTDHLFNIAKPRPPWMGLLGPTIQAEVYDTVVITLKNMASHPVSLHAVGVSYWKASEGAEYDDQTSQREKEDDKVFPGGSHTYVWQVLKENGPMASDPLCLTYSYLSHVDLVKDLNSGLIGALLVCREGSLAKEKTQTLHKFILLFAVFDEGKSWHSETKNSLMQDRDAASARAWPKMHTVNGYVNRSLPGLIGCHRKSVYWHVIGMGTTPEVHSIFLEGHTFLVRNHRQASLEISPITFLTAQTLLMDLGQFLLFCHISSHQHDGMEAYVKVDSCPEEPQLRMKNNEEAEDYDDDLTDSEMDVVRFDDDNSPSFIQIRSVAKKHPKTWVHYIAAEEEDWDYAPLVLAPDGAPGASPGTSSTGSPGSSPSASTGTGPGSSPSASTGTGPGTPGSGTASSSPGSSTPSGATGSPGSSPSASTGTGPGASPGTSSTGSPGTPGSGTASSSPGSSTPSGATGSPGTPGSGTASSSPGASPGTSSTGSPGASPGTSSTGSPASSDRSYKSQYLNNGPQRIGRKYKKVRFMAYTDETFKTREAIQHESGILGPLLYGEVGDTLLIIFKNQASRPYNIYPHGITDVRPLYSRRLPKGVKHLKDFPILPGEIFKYKWTVTVEDGPTKSDPRCLTRYYSSFVNMERDLASGLIGPLLICYKESVDQRGNQIMSDKRNVILFSVFDENRSWYLTENIQRFLPNPAGVQLEDPEFQASNIMHSINGYVFDSLQLSVCLHEVAYWYILSIGAQTDFLSVFFSGYTFKHKMVYEDTLTLFPFSGETVFMSMENPGLWILGCHNSDFRNRGMTALLKVSSCDKNTGDYYEDSYEDISAYLLSKNNAIEPRSFSQNGAPSPAGSPTSTEEGTSESATPESGPGSEPATSGSETPGTSESATPESGPGTSTEPSEGSAPGTSTEPSEGSAPGTSTEPSEGSAPGTSTEPSEGSAPGTSTEPSEGSAPGTSTEPSEGSAPGSPAGSPTSTEEGTSTEPSEGSAPGASSPPVLKRHQAEITRTTLQSDQEEIDYDDTISVEMKKEDFDIYDEDENQSPRSFQKKTRHYFIAAVERLWDYGMSSSPHVLRNRAQGAPTSESATPESGPGSEPATSGSETPGTSESATPESGPGSEPATSGSETPGTSESATPESGPGTSTEPSEGSAPGTSESATPESGPGSPAGSPTSTEEGSPAGSPTSTEEGSPAGSPTSTEEGTSESATPESGPGTSTEPSEGSAPGASSRAQSGSVPQFKKVVFQEFTDGSFTQPLYRGELNEHLGLLGPYIRAEVEDNIMVTFRNQASRPYSFYSSLISYEEDQRQGAEPRKNFVKPNETKTYFWKVQHHMAPTKDEFDCKAWAYFSDVDLEKDVHSGLIGPLLVCHTNTLNPAHGRQVTVQEFALFFTIFDETKSWYFTENMERNCRAPCNIQMEDPTFKENYRFHAINGYIMDTLPGLVMAQDQRIRWYLLSMGSNENIHSIHFSGHVFTVRKKEEYKMALYNLYPGVFETVEMLPSKAGIWRVECLIGEHLHAGMSTLFLVYSNKCQTPLGMASGHIRDFQITASGQYGQWAPKLARLHYSGSINAWSTKEPFSWIKVDLLAPMIIHGIKTQGARQKFSSLYISQFIIMYSLDGKKWQTYRGNSTGTLMVFFGNVDSSGIKHNIFNPPIIARYIRLHPTHYSIRSTLRMELMGCDLNSCSMPLGMESKAISDAQITASSYFTNMFATWSPSKARLHLQGRSNAWRPQVNNPKEWLQVDFQKTMKVTGVTTQGVKSLLTSMYVKEFLISSSQDGHQWTLFFQNGKVKVFQGNQDSFTPVVNSLDPPLLTRYLRIHPQSWVHQIALRMEVLGCEAQDLYGAPGTSESATPESGPGSEPATSGSETPGTSESATPESGPGSEPATSGSETPGTSESATPESGPGTSTEPSEGSAPGSPAGSPTSTEEGTSESATPESGPGSEPATSGSETPGTSESATPESGPGSPAGSPTSTEEGSPAGSPTSTEEGTSTEPSEGSAPGTSESATPESGPGTSESATPESGPGTSESATPESGPGSEPATSGSETPGSEPATSGSETPGSPAGSPTSTEEGTSTEPSEGSAPGTSTEPSEGSAPGSEPATSGSETPGTSESATPESGPGTSTEPSEGSAPASSEQKLISEEDLSPATGHHHHHH

SEQ ID NO: 1294 - DNA, 6621 bp, synthetic construct
  misc_feature 1..6621: note = Description of Artificial Sequence: Synthetic polynucleotide
  source 1..6621: mol_type = other DNA
gccaccagaagatactacctgggtgcagtggaactgtcatgggactatatgcaaagtgatctcggtgagctgcctgtggacgcaagatttcctcctagagtgccaaaatcttttccattcaacacctcagtcgtgtacaaaaagactctgtttgtagaattcacggatcaccttttcaacatcgctaagccaaggccaccctggatgggtctgctaggtcctaccatccaggctgaggtttatgatacagtggtcattacacttaagaacatggcttcccatcctgtcagtcttcatgctgttggtgtatcctactggaaagcttctgagggagctgaatatgatgatcagaccagtcaaagggagaaagaagatgataaagtcttccctggtggaagccatacatatgtctggcaggtcctgaaagagaatggtccaatggcctctgacccactgtgccttacctactcatatctttctcatgtggacctggtaaaagacttgaattcaggcctcattggagccctactagtatgtagagaagggagtctggccaaggaaaagacacagaccttgcacaaatttatactactttttgctgtatttgatgaagggaaaagttggcactcagaaacaaagaactccttgatgcaggatagggatgctgcatctgctcgggcctggcctaaaatgcacacagtcaatggttatgtaaacaggtctctgccaggtctgattggatgccacaggaaatcagtctattggcatgtgattggaatgggcaccactcctgaagtgcactcaatattcctcgaaggtcacacatttcttgtgaggaaccatcgccaggctagcttggaaatctcgccaataactttccttactgctcaaacactcttgatggaccttggacagtttctactgttttgtcatatctcttcccaccaacatgatggcatggaagcttatgtcaaagtagacagctgtccagaggaaccccaactacgaatgaaaaataatgaagaagcggaagactatgatgatgatcttactgattctgaaatggatgtggtcaggtttgatgatgacaactctccttcctttatccaaattcgctcagttgccaagaagcatcctaaaacttgggtacattacattgctgctgaagaggaggactgggactatgctcccttagtcctcgcccccgatggcgcgccaggtgcctcgccgggaacatcatcaactggttcacccgggtcatccccctcggcctcaaccgggacgggtcccggctcatcccccagcgccagcactggaacaggtcctggcactcctggttccggtacggcatcgtcatccccgggaagctcaacaccgtccggagcgacaggatcacctggctcgtcaccttcggcgtcaactggaacggggccaggggcctcacccggaacgtcctcgactgggtcgcctggtacgccgggatcaggaacggcctcatcctcgcctgggtcctcaacgccctcgggtgcgactggttcgccgggaactcctggctcggggacggcctcgtcgtcgcctggggcatcaccggggacgagctccacggggtcccctggagcgtcaccggggacctcctcgacaggtagcccggcctcgagcgacagaagttataaaagtcaatatttgaacaatggccctcagcggattggtaggaagtacaaaaaagtccgatttatggcatacacagatgaaacctttaagactcgtgaagctattcagcatgaatcaggaatcttgggacctttactttatggggaagttggagacacactgttgattatatttaagaatcaagcaagcagaccatataacatctaccctcacggaatcactgatgtccgtcctttgtattcaaggagattaccaaaaggtgtaaaacatttgaaggattttccaattctgccaggagaaatattcaaatataaatggacagtgactgtagaagatgggccaactaaatcagatcctcggtgcctgacccgctattactctagtttcgttaatatggagagagatctagcttcaggactcattggccctctcctcatctgctacaaagaatctgtagatcaaagaggaaaccagataatgtcagacaagaggaatgtcatcctgttttctgtatttgatgagaaccgaagctggtacctcacagagaatatacaacgctttctccccaatccagctggagtgcagcttgaggatccagagttccaagcctccaacatcatgcacagcatcaatggctatgtttttgatagtttgcagttgtcagtttgtttgcatgaggtggcatactggtacattctaagcattggagcacagactgacttcctttctgtcttcttctctggatataccttcaaacacaaaatggtctatgaagacacactcaccctattcccattctcaggagaaactgtcttcatgtcgatggaaaacccaggtctatggattctggggtgccacaactcagactttcggaacagaggcatgaccgccttactgaaggtttctagttgtgacaagaacactggtgattattacgaggacagttatgaagatatttcagcatacttgctgagtaaaaacaatgccattgaaccaagaagcttctctcaaaacggcgcgccaagtcccgctggaagcccaactagcaccgaagaggggacctcagagtccgccacccccgagtccggccctggctctgagcctgccactagcggctccgagactcctggcacatccgaaagcgctacacccgagagtggacccggcacctctaccgagcccagtgagggctccgcccctggaacaagcaccgagcccagcgaaggcagcgccccagggacctccacagagcccagtgaaggcagtgctcctggcaccagcaccgaaccaagcgagggctctgcacccgggacctccaccgagccaagcgaaggctctgcccctggcacttccaccgagcccagcgaaggcagcgcccctgggagccccgctggctctcccaccagcactgaggagggcacatctaccgaaccaagtgaaggctctgcaccaggtgcctcgagcccaccagtcttgaaacgccatcaagctgaaataactcgtactactcttcagtcagatcaagaggaaatcgattatgatgataccatatcagttgaaatgaagaaggaagattttgacatttatgatgaggatgaaaatcagagcccccgcagctttcaaaagaaaacacgacactattttattgctgcagtggagaggctctgggattatgggatgagtagctccccacatgttctaagaaacagggctcagggcgcgccaacgtccgaaagtgctacccctgagtcaggccctggtagtgagcctgccacaagcggaagcgaaactccggggacctcagagtctgccactcccgaatcggggccaggctctgaaccggccacttcagggagcgaaacaccaggaacatcggagagcgctaccccggagagcgggccaggaactagtactgagcctagcgagggaagtgcacctggtacaagcgagtccgccacacccgagtctggccctggctctccagcgggctcacccacgagcactgaagagggctctcccgctggcagcccaacgtcgacagaagaaggatcaccagcaggctcccccacatcaacagaggagggtacatcagaatctgctactcccgagagtggacccggtacctccactgagcccagcgaggggagtgcaccaggtgcctcgagcagggctcagagtggcagtgtccctcagttcaagaaagttgttttccaggaatttactgatggctcctttactcagcccttataccgtggagaactaaatgaacatttgggactcctggggccatatataagagcagaagttgaagataatatcatggtaactttcagaaatcaggcctctcgtccctattccttctattctagccttatttcttatgaggaagatcagaggcaaggagcagaacctagaaaaaactttgtcaagcctaatgaaaccaaaacttacttttggaaagtgcaacatcatatggcacccactaaagatgagtttgactgcaaagcctgggcttatttctctgatgttgacctggaaaaagatgtgcactcaggcctgattggaccccttctggtctgccacactaacacactgaaccctgctcatgggagacaagtgacagtacaggaatttgctctgtttttcaccatctttgatgagaccaaaagctggtacttcactgaaaatatggaaagaaactgcagggctccctgcaatatccagatggaagatcccacttttaaagagaattatcgcttccatgcaatcaatggctacataatggatacactacctggcttagtaatggctcaggatcaaaggattcgatggtatctgctcagcatgggcagcaatgaaaacatccattctattcatttcagtggacatgtgttcactgtacgaaaaaaagaggagtataaaatggcactgtacaatctctatccaggtgtttttgagacagtggaaatgttaccatccaaagctggaatttggcgggtggaatgccttattggcgagcatctacatgctgggatgagcacactttttctggtgtacagcaataagtgtcagactcccctgggaatggcttctggacacattagagattttcagattacagcttcaggacaatatggacagtgggccccaaagctggccagacttcattattccggatcaatcaatgcctggagcaccaaggagcccttttcttggatcaaggtggatctgttggcaccaatgattattcacggcatcaagacccagggtgcccgtcagaagttctccagcctctacatctctcagtttatcatcatgtatagtcttgatgggaagaagtggcagacttatcgaggaaattccactggaaccttaatggtcttctttggcaatgtggattcatctgggataaaacacaatatttttaaccctccaattattgctcgatacatccgtttgcacccaactcattatagcattcgcagcactcttcgcatggagttgatgggctgtgatttaaatagttgcagcatgccattgggaatggagagtaaagcaatatcagatgcacagattactgcttcatcctactttaccaatatgtttgccacctggtctccttcaaaagctcgacttcacctccaagggaggagtaatgcctggagacctcaggtgaataatccaaaagagtggctgcaagtggacttccagaagacaatgaaagtcacaggagtaactactcagggagtaaaatctctgcttaccagcatgtatgtgaaggagttcctcatctccagcagtcaagatggccatcagtggactctcttttttcagaatggcaaagtaaaggtttttcagggaaatcaagactccttcacacctgtggtgaactctctagacccaccgttactgactcgctaccttcgaattcacccccagagttgggtgcaccagattgccctgaggatggaggttctgggctgcgaggcacaggacctctacggcgcgccaggtacctcagagtctgctacccccgagtcagggccaggatcagagccagccacctccgggtctgagacacccgggacttccgagagtgccacccctgagtccggacccgggtccgagcccgccacttccggctccgaaactcccggcacaagcgagagcgctaccccagagtcaggaccaggaacatctacagagccctctgaaggctccgctccagggtccccagccggcagtcccactagcaccgaggagggaacctctgaaagcgccacacccgaatcagggccagggtctgagcctgctaccagcggcagcgagacaccaggcacctctgagtccgccacaccagagtccggacccggatctcccgctgggagccccacctccactgaggagggatctcctgctggctctccaacatctactgaggaaggtacctcaaccgagccatccgagggatcagctcccggcacctcagagtcggcaaccccggagtctggacccggaacttccgaaagtgccacaccagagtccggtcccgggacttcagaatcagcaacacccgagtccggccctgggtctgaacccgccacaagtggtagtgagacaccaggatcagaacctgctacctcagggtcagagacacccggatctccggcaggctcaccaacctccactgaggagggcaccagcacagaaccaagcgagggctccgcacccggaacaagcactgaacccagtgagggttcagcacccggctctgagccggccacaagtggcagtgagacacccggcacttcagagagtgccacccccgagagtggcccaggcactagtaccgagccctctgaaggcagtgcgccagcctcgagcgaacaaaaactcatctcagaagaggatctgtcacctgcaaccggtcatcatcaccatcaccattga

SEQ ID NO: 1295 - protein, 2206 aa, synthetic construct
  REGION 1..2206: note = Description of Artificial Sequence: Synthetic polypeptide
ATRRYYLGAVELSWDYMQSDLGELPVDARFPPRVPKSFPFNTSVVYKKTLFVEFTDHLFNIAKPRPPWMGLLGPTIQAEVYDTVVITLKNMASHPVSLHAVGVSYWKASEGAEYDDQTSQREKEDDKVFPGGSHTYVWQVLKENGPMASDPLCLTYSYLSHVDLVKDLNSGLIGALLVCREGSLAKEKTQTLHKFILLFAVFDEGKSWHSETKNSLMQDRDAASARAWPKMHTVNGYVNRSLPGLIGCHRKSVYWHVIGMGTTPEVHSIFLEGHTFLVRNHRQASLEISPITFLTAQTLLMDLGQFLLFCHISSHQHDGMEAYVKVDSCPEEPQLRMKNNEEAEDYDDDLTDSEMDVVRFDDDNSPSFIQIRSVAKKHPKTWVHYIAAEEEDWDYAPLVLAPDDRSYKSGAPTSTEPSEGSAPGSPAGSPTSTEEGTSTEPSEGSAPGTSTEPSEGSAPGTSESATPESGPGTSTEPSEGSAPGTSESATPESGPGSEPATSGSETPGTSTEPSEGSAPGTSTEPSEGSAPGTSESATPESGPGTSESATPESGPGASSQYLNNGPQRIGRKYKKVRFMAYTDETFKTREAIQHESGILGPLLYGEVGDTLLIIFKNQASRPYNIYPHGITDVRPLYSRRLPKGVKHLKDFPILPGEIFKYKWTVTVEDGPTKSDPRCLTRYYSSFVNMERDLASGLIGPLLICYKESVDQRGNQIMSDKRNVILFSVFDENRSWYLTENIQRFLPNPAGVQLEDPEFQASNIMHSINGYVFDSLQLSVCLHEVAYWYILSIGAQTDFLSVFFSGYTFKHKMVYEDTLTLFPFSGETVFMSMENPGLWILGCHNSDFRNRGMTALLKVSSCDKNTGDYYEDSYEDISAYLLSKNNAIEPRSFSQNGAPSPAGSPTSTEEGTSESATPESGPGSEPATSGSETPGTSESATPESGPGTSTEPSEGSAPGTSTEPSEGSAPGTSTEPSEGSAPGTSTEPSEGSAPGTSTEPSEGSAPGTSTEPSEGSAPGSPAGSPTSTEEGTSTEPSEGSAPGASSPPVLKRHQAEITRTTLQSDQEEIDYDDTISVEMKKEDFDIYDEDENQSPRSFQKKTRHYFIAAVERLWDYGMSSSPHVLRNRAQGAPGTPGSGTASSSPGASPGTSSTGSPGASPGTSSTGSPGASPGTSSTGSPGSSPSASTGTGPGTPGSGTASSSPGASPGTSSTGSPGASPGTSSTGSPGASPGTSSTGSPGSSTPSGATGSPGSSTPSGATGSPGASPGTSSTGSPASSRAQSGSVPQFKKVVFQEFTDGSFTQPLYRGELNEHLGLLGPYIRAEVEDNIMVTFRNQASRPYSFYSSLISYEEDQRQGAEPRKNFVKPNETKTYFWKVQHHMAPTKDEFDCKAWAYFSDVDLEKDVHSGLIGPLLVCHTNTLNPAHGRQVTVQEFALFFTIFDETKSWYFTENMERNCRAPCNIQMEDPTFKENYRFHAINGYIMDTLPGLVMAQDQRIRWYLLSMGSNENIHSIHFSGHVFTVRKKEEYKMALYNLYPGVFETVEMLPSKAGIWRVECLIGEHLHAGMSTLFLVYSNKCQTPLGMASGHIRDFQITASGQYGQWAPKLARLHYSGSINAWSTKEPFSWIKVDLLAPMIIHGIKTQGARQKFSSLYISQFIIMYSLDGKKWQTYRGNSTGTLMVFFGNVDSSGIKHNIFNPPIIARYIRLHPTHYSIRSTLRMELMGCDLNSCSMPLGMESKAISDAQITASSYFTNMFATWSPSKARLHLQGRSNAWRPQVNNPKEWLQVDFQKTMKVTGVTTQGVKSLLTSMYVKEFLISSSQDGHQWTLFFQNGKVKVFQGNQDSFTPVVNSLDPPLLTRYLRIHPQSWVHQIALRMEVLGCEAQDLYGAPGTSESATPESGPGSEPATSGSETPGTSESATPESGPGSEPATSGSETPGTSESATPESGPGTSTEPSEGSAPGSPAGSPTSTEEGTSESATPESGPGSEPATSGSETPGTSESATPESGPGSPAGSPTSTEEGSPAGSPTSTEEGTSTEPSEGSAPGTSESATPESGPGTSESATPESGPGTSESATPESGPGSEPATSGSETPGSEPATSGSETPGSPAGSPTSTEEGTSTEPSEGSAPGTSTEPSEGSAPGSEPATSGSETPGTSESATPESGPGTSTEPSEGSAPASSEQKLISEEDLSPATGHHHHHH

SEQ ID NO: 1296 - DNA, 6621 bp, synthetic construct
  misc_feature 1..6621: note = Description of Artificial Sequence: Synthetic polynucleotide
  source 1..6621: mol_type = other DNA
gccaccagaagatactacctgggtgcagtggaactgtcatgggactatatgcaaagtgatctcggtgagctgcctgtggacgcaagatttcctcctagagtgccaaaatcttttccattcaacacctcagtcgtgtacaaaaagactctgtttgtagaattcacggatcaccttttcaacatcgctaagccaaggccaccctggatgggtctgctaggtcctaccatccaggctgaggtttatgatacagtggtcattacacttaagaacatggcttcccatcctgtcagtcttcatgctgttggtgtatcctactggaaagcttctgagggagctgaatatgatgatcagaccagtcaaagggagaaagaagatgataaagtcttccctggtggaagccatacatatgtctggcaggtcctgaaagagaatggtccaatggcctctgacccactgtgccttacctactcatatctttctcatgtggacctggtaaaagacttgaattcaggcctcattggagccctactagtatgtagagaagggagtctggccaaggaaaagacacagaccttgcacaaatttatactactttttgctgtatttgatgaagggaaaagttggcactcagaaacaaagaactccttgatgcaggatagggatgctgcatctgctcgggcctggcctaaaatgcacacagtcaatggttatgtaaacaggtctctgccaggtctgattggatgccacaggaaatcagtctattggcatgtgattggaatgggcaccactcctgaagtgcactcaatattcctcgaaggtcacacatttcttgtgaggaaccatcgccaggctagcttggaaatctcgccaataactttccttactgctcaaacactcttgatggaccttggacagtttctactgttttgtcatatctcttcccaccaacatgatggcatggaagcttatgtcaaagtagacagctgtccagaggaaccccaactacgaatgaaaaataatgaagaagcggaagactatgatgatgatcttactgattctgaaatggatgtggtcaggtttgatgatgacaactctccttcctttatccaaattcgctcagttgccaagaagcatcctaaaacttgggtacattacattgctgctgaagaggaggactgggactatgctcccttagtcctcgcccccgatgacagaagttataaaagtggcgcgccaaccagtacggagccgtccgaggggagcgcaccaggaagcccggctgggagcccgacttctaccgaagagggtacatctaccgaaccaagtgaaggttcagcaccaggcacctcaacagaaccctctgagggctcggcgcctggtacaagtgagtccgccaccccagaatccgggcctgggacaagcacagaaccttcggaagggagtgcccctggaacatccgaatcggcaaccccagaatcagggccaggatctgagcccgcgacttcgggctccgagacgcctgggacatccaccgagccctccgaaggatcagccccaggcaccagcacggagccctctgagggaagcgcacctggtaccagcgaaagcgcaactcccgaatcaggtcccggtacgagcgagtcggcgaccccggagagcgggccaggtgcctcgagccaatatttgaacaatggccctcagcggattggtaggaagtacaaaaaagtccgatttatggcatacacagatgaaacctttaagactcgtgaagctattcagcatgaatcaggaatcttgggacctttactttatggggaagttggagacacactgttgattatatttaagaatcaagcaagcagaccatataacatctaccctcacggaatcactgatgtccgtcctttgtattcaaggagattaccaaaaggtgtaaaacatttgaaggattttccaattctgccaggagaaatattcaaatataaatggacagtgactgtagaagatgggccaactaaatcagatcctcggtgcctgacccgctattactctagtttcgttaatatggagagagatctagcttcaggactcattggccctctcctcatctgctacaaagaatctgtagatcaaagaggaaaccagataatgtcagacaagaggaatgtcatcctgttttctgtatttgatgagaaccgaagctggtacctcacagagaatatacaacgctttctccccaatccagctggagtgcagcttgaggatccagagttccaagcctccaacatcatgcacagcatcaatggctatgtttttgatagtttgcagttgtcagtttgtttgcatgaggtggcatactggtacattctaagcattggagcacagactgacttcctttctgtcttcttctctggatataccttcaaacacaaaatggtctatgaagacacactcaccctattcccattctcaggagaaactgtcttcatgtcgatggaaaacccaggtctatggattctggggtgccacaactcagactttcggaacagaggcatgaccgccttactgaaggtttctagttgtgacaagaacactggtgattattacgaggacagttatgaagatatttcagcatacttgctgagtaaaaacaatgccattgaaccaagaagcttctctcaaaacggcgcgccaagtcccgctggaagcccaactagcaccgaagaggggacctcagagtccgccacccccgagtccggccctggctctgagcctgccactagcggctccgagactcctggcacatccgaaagcgctacacccgagagtggacccggcacctctaccgagcccagtgagggctccgcccctggaacaagcaccgagcccagcgaaggcagcgccccagggacctccacagagcccagtgaaggcagtgctcctggcaccagcaccgaaccaagcgagggctctgcacccgggacctccaccgagccaagcgaaggctctgcccctggcacttccaccgagcccagcgaaggcagcgcccctgggagccccgctggctctcccaccagcactgaggagggcacatctaccgaaccaagtgaaggctctgcaccaggtgcctcgagcccaccagtcttgaaacgccatcaagctgaaataactcgtactactcttcagtcagatcaagaggaaatcgattatgatgataccatatcagttgaaatgaagaaggaagattttgacatttatgatgaggatgaaaatcagagcccccgcagctttcaaaagaaaacacgacactattttattgctgcagtggagaggctctgggattatgggatgagtagctccccacatgttctaagaaacagggctcagggcgcgccaggtacacccggatcgggtacagcgtcatcgagccccggtgcgtcacctggtacgtcgagcacggggtcgccaggggcgtcccctgggacgtcctcaacaggctcgcccggtgcgtcacccggcacgtcgtccacgggttcacctggtagctccccttccgcgtccactggcaccgggcctggaactccggggagcggcacagcgagctcgtcgccgggagcatcgcctgggacatcgagcaccgggtcgccaggagcatcgcccggaacatccagcacaggaagccccggcgcgtcgcccgggacatcaagcacaggttccccgggatcgagcacgccgtccggagccactggatcaccagggagctcgacaccttccggcgcaacgggatcgcccggagccagcccgggtacgtcaagcactggctcccctgcctcgagcagggctcagagtggcagtgtccctcagttcaagaaagttgttttccaggaatttactgatggctcctttactcagcccttataccgtggagaactaaatgaacatttgggactcctggggccatatataagagcagaagttgaagataatatcatggtaactttcagaaatcaggcctctcgtccctattccttctattctagccttatttcttatgaggaagatcagaggcaaggagcagaacctagaaaaaactttgtcaagcctaatgaaaccaaaacttacttttggaaagtgcaacatcatatggcacccactaaagatgagtttgactgcaaagcctgggcttatttctctgatgttgacctggaaaaagatgtgcactcaggcctgattggaccccttctggtctgccacactaacacactgaaccctgctcatgggagacaagtgacagtacaggaatttgctctgtttttcaccatctttgatgagaccaaaagctggtacttcactgaaaatatggaaagaaactgcagggctccctgcaatatccagatggaagatcccacttttaaagagaattatcgcttccatgcaatcaatggctacataatggatacactacctggcttagtaatggctcaggatcaaaggattcgatggtatctgctcagcatgggcagcaatgaaaacatccattctattcatttcagtggacatgtgttcactgtacgaaaaaaagaggagtataaaatggcactgtacaatctctatccaggtgtttttgagacagtggaaatgttaccatccaaagctggaatttggcgggtggaatgccttattggcgagcatctacatgctgggatgagcacactttttctggtgtacagcaataagtgtcagactcccctgggaatggcttctggacacattagagattttcagattacagcttcaggacaatatggacagtgggccccaaagctggccagacttcattattccggatcaatcaatgcctggagcaccaaggagcccttttcttggatcaaggtggatctgttggcaccaatgattattcacggcatcaagacccagggtgcccgtcagaagttctccagcctctacatctctcagtttatcatcatgtatagtcttgatgggaagaagtggcagacttatcgaggaaattccactggaaccttaatggtcttctttggcaatgtggattcatctgggataaaacacaatatttttaaccctccaattattgctcgatacatccgtttgcacccaactcattatagcattcgcagcactcttcgcatggagttgatgggctgtgatttaaatagttgcagcatgccattgggaatggagagtaaagcaatatcagatgcacagattactgcttcatcctactttaccaatatgtttgccacctggtctccttcaaaagctcgacttcacctccaagggaggagtaatgcctggagacctcaggtgaataatccaaaagagtggctgcaagtggacttccagaagacaatgaaagtcacaggagtaactactcagggagtaaaatctctgcttaccagcatgtatgtgaaggagttcctcatctccagcagtcaagatggccatcagtggactctcttttttcagaatggcaaagtaaaggtttttcagggaaatcaagactccttcacacctgtggtgaactctctagacccaccgttactgactcgctaccttcgaattcacccccagagttgggtgcaccagattgccctgaggatggaggttctgggctgcgaggcacaggacctctacggcgcgccaggtacctcagagtctgctacccccgagtcagggccaggatcagagccagccacctccgggtctgagacacccgggacttccgagagtgccacccctgagtccggacccgggtccgagcccgccacttccggctccgaaactcccggcacaagcgagagcgctaccccagagtcaggaccaggaacatctacagagccctctgaaggctccgctccagggtccccagccggcagtcccactagcaccgaggagggaacctctgaaagcgccacacccgaatcagggccagggtctgagcctgctaccagcggcagcgagacaccaggcacctctgagtccgccacaccagagtccggacccggatctcccgctgggagccccacctccactgaggagggatctcctgctggctctccaacatctactgaggaaggtacctcaaccgagccatccgagggatcagctcccggcacctcagagtcggcaaccccggagtctggacccggaacttccgaaagtgccacaccagagtccggtcccgggacttcagaatcagcaacacccgagtccggccctgggtctgaacccgccacaagtggtagtgagacaccaggatcagaacctgctacctcagggtcagagacacccggatctccggcaggctcaccaacctccactgaggagggcaccagcacagaaccaagcgagggctccgcacccggaacaagcactgaacccagtgagggttcagcacccggctctgagccggccacaagtggcagtgagacacccggcacttcagagagtgccacccccgagagtggcccaggcactagtaccgagccctctgaaggcagtgcgccagcctcgagcgaacaaaaactcatctcagaagaggatctgtcacctgcaaccggtcatcatcaccatcaccattga

SEQ ID NO: 1297 - protein, 2206 aa, synthetic construct
  REGION 1..2206: note = Description of Artificial Sequence: Synthetic polypeptide
ATRRYYLGAVELSWDYMQSDLGELPVDARFPPRVPKSFPFNTSVVYKKTLFVEFTDHLFNIAKPRPPWMGLLGPTIQAEVYDTVVITLKNMASHPVSLHAVGVSYWKASEGAEYDDQTSQREKEDDKVFPGGSHTYVWQVLKENGPMASDPLCLTYSYLSHVDLVKDLNSGLIGALLVCREGSLAKEKTQTLHKFILLFAVFDEGKSWHSETKNSLMQDRDAASARAWPKMHTVNGYVNRSLPGLIGCHRKSVYWHVIGMGTTPEVHSIFLEGHTFLVRNHRQASLEISPITFLTAQTLLMDLGQFLLFCHISSHQHDGMEAYVKVDSCPEEPQLRMKNNEEAEDYDDDLTDSEMDVVRFDDDNSPSFIQIRSVAKKHPKTWVHYIAAEEEDWDYAPLVLAPDGAPTSTEPSEGSAPGSPAGSPTSTEEGTSTEPSEGSAPGTSTEPSEGSAPGTSESATPESGPGTSTEPSEGSAPGTSESATPESGPGSEPATSGSETPGTSTEPSEGSAPGTSTEPSEGSAPGTSESATPESGPGTSESATPESGPGASSDRSYKSQYLNNGPQRIGRKYKKVRFMAYTDETFKTREAIQHESGILGPLLYGEVGDTLLIIFKNQASRPYNIYPHGITDVRPLYSRRLPKGVKHLKDFPILPGEIFKYKWTVTVEDGPTKSDPRCLTRYYSSFVNMERDLASGLIGPLLICYKESVDQRGNQIMSDKRNVILFSVFDENRSWYLTENIQRFLPNPAGVQLEDPEFQASNIMHSINGYVFDSLQLSVCLHEVAYWYILSIGAQTDFLSVFFSGYTFKHKMVYEDTLTLFPFSGETVFMSMENPGLWILGCHNSDFRNRGMTALLKVSSCDKNTGDYYEDSYEDISAYLLSKNNAIEPRSFSQNGAPSPAGSPTSTEEGTSESATPESGPGSEPATSGSETPGTSESATPESGPGTSTEPSEGSAPGTSTEPSEGSAPGTSTEPSEGSAPGTSTEPSEGSAPGTSTEPSEGSAPGTSTEPSEGSAPGSPAGSPTSTEEGTSTEPSEGSAPGASSPPVLKRHQAEITRTTLQSDQEEIDYDDTISVEMKKEDFDIYDEDENQSPRSFQKKTRHYFIAAVERLWDYGMSSSPHVLRNRAQGAPGTPGSGTASSSPGASPGTSSTGSPGASPGTSSTGSPGASPGTSSTGSPGSSPSASTGTGPGTPGSGTASSSPGASPGTSSTGSPGASPGTSSTGSPGASPGTSSTGSPGSSTPSGATGSPGSSTPSGATGSPGASPGTSSTGSPASSRAQSGSVPQFKKVVFQEFTDGSFTQPLYRGELNEHLGLLGPYIRAEVEDNIMVTFRNQASRPYSFYSSLISYEEDQRQGAEPRKNFVKPNETKTYFWKVQHHMAPTKDEFDCKAWAYFSDVDLEKDVHSGLIGPLLVCHTNTLNPAHGRQVTVQEFALFFTIFDETKSWYFTENMERNCRAPCNIQMEDPTFKENYRFHAINGYIMDTLPGLVMAQDQRIRWYLLSMGSNENIHSIHFSGHVFTVRKKEEYKMALYNLYPGVFETVEMLPSKAGIWRVECLIGEHLHAGMSTLFLVYSNKCQTPLGMASGHIRDFQITASGQYGQWAPKLARLHYSGSINAWSTKEPFSWIKVDLLAPMIIHGIKTQGARQKFSSLYISQFIIMYSLDGKKWQTYRGNSTGTLMVFFGNVDSSGIKHNIFNPPIIARYIRLHPTHYSIRSTLRMELMGCDLNSCSMPLGMESKAISDAQITASSYFTNMFATWSPSKARLHLQGRSNAWRPQVNNPKEWLQVDFQKTMKVTGVTTQGVKSLLTSMYVKEFLISSSQDGHQWTLFFQNGKVKVFQGNQDSFTPVVNSLDPPLLTRYLRIHPQSWVHQIALRMEVLGCEAQDLYGAPGTSESATPESGPGSEPATSGSETPGTSESATPESGPGSEPATSGSETPGTSESATPESGPGTSTEPSEGSAPGSPAGSPTSTEEGTSESATPESGPGSEPATSGSETPGTSESATPESGPGSPAGSPTSTEEGSPAGSPTSTEEGTSTEPSEGSAPGTSESATPESGPGTSESATPESGPGTSESATPESGPGSEPATSGSETPGSEPATSGSETPGSPAGSPTSTEEGTSTEPSEGSAPGTSTEPSEGSAPGSEPATSGSETPGTSESATPESGPGTSTEPSEGSAPASSEQKLISEEDLSPATGHHHHHH

SEQ ID NO: 1298 - DNA, 6621 bp, synthetic construct
  misc_feature 1..6621: note = Description of Artificial Sequence: Synthetic polynucleotide
  source 1..6621: mol_type = other DNA
gccaccagaagatactacctgggtgcagtggaactgtcatgggactatatgcaaagtgatctcggtgagctgcctgtggacgcaagatttcctcctagagtgccaaaatcttttccattcaacacctcagtcgtgtacaaaaagactctgtttgtagaattcacggatcaccttttcaacatcgctaagccaaggccaccctggatgggtctgctaggtcctaccatccaggctgaggtttatgatacagtggtcattacacttaagaacatggcttcccatcctgtcagtcttcatgctgttggtgtatcctactggaaagcttctgagggagctgaatatgatgatcagaccagtcaaagggagaaagaagatgataaagtcttccctggtggaagccatacatatgtctggcaggtcctgaaagagaatggtccaatggcctctgacccactgtgccttacctactcatatctttctcatgtggacctggtaaaagacttgaattcaggcctcattggagccctactagtatgtagagaagggagtctggccaaggaaaagacacagaccttgcacaaatttatactactttttgctgtatttgatgaagggaaaagttggcactcagaaacaaagaactccttgatgcaggatagggatgctgcatctgctcgggcctggcctaaaatgcacacagtcaatggttatgtaaacaggtctctgccaggtctgattggatgccacaggaaatcagtctattggcatgtgattggaatgggcaccactcctgaagtgcactcaatattcctcgaaggtcacacatttcttgtgaggaaccatcgccaggctagcttggaaatctcgccaataactttccttactgctcaaacactcttgatggaccttggacagtttctactgttttgtcatatctcttcccaccaacatgatggcatggaagcttatgtcaaagtagacagctgtccagaggaaccccaactacgaatgaaaaataatgaagaagcggaagactatgatgatgatcttactgattctgaaatggatgtggtcaggtttgatgatgacaactctccttcctttatccaaattcgctcagttgccaagaagcatcctaaaacttgggtacattacattgctgctgaagaggaggactgggactatgctcccttagtcctcgcccccgatggcgcgccaaccagtacggagccgtccgaggggagcgcaccaggaagcccggctgggagcccgacttctaccgaagagggtacatctaccgaaccaagtgaaggttcagcaccaggcacctcaacagaaccctctgagggctcggcgcctggtacaagtgagtccgccaccccagaatccgggcctgggacaagcacagaaccttcggaagggagtgcccctggaacatccgaatcggcaaccccagaatcagggccaggatctgagcccgcgacttcgggctccgagacgcctgggacatccaccgagccctccgaaggatcagccccaggcaccagcacggagccctctgagggaagcgcacctggtaccagcgaaagcgcaactcccgaatcaggtcccggtacgagcgagtcggcgaccccggagagcgggccaggtgcctcgagcgacagaagttataaaagtcaatatttgaacaatggccctcagcggattggtaggaagtacaaaaaagtccgatttatggcatacacagatgaaacctttaagactcgtgaagctattcagcatgaatcaggaatcttgggacctttactttatggggaagttggagacacactgttgattatatttaagaatcaagcaagcagaccatataacatctaccctcacggaatcactgatgtccgtcctttgtattcaaggagattaccaaaaggtgtaaaacatttgaaggattttccaattctgccaggagaaatattcaaatataaatggacagtgactgtagaagatgggccaactaaatcagatcctcggtgcctgacccgctattactctagtttcgttaatatggagagagatctagcttcaggactcattggccctctcctcatctgctacaaagaatctgtagatcaaagaggaaaccagataatgtcagacaagaggaatgtcatcctgttttctgtatttgatgagaaccgaagctggtacctcacagagaatatacaacgctttctccccaatccagctggagtgcagcttgaggatccagagttccaagcctccaacatcatgcacagcatcaatggctatgtttttgatagtttgcagttgtcagtttgtttgcatgaggtggcatactggtacattctaagcattggagcacagactgacttcctttctgtcttcttctctggatataccttcaaacacaaaatggtctatgaagacacactcaccctattcccattctcaggagaaactgtcttcatgtcgatggaaaacccaggtctatggattctggggtgccacaactcagactttcggaacagaggcatgaccgccttactgaaggtttctagttgtgacaagaacactggtgattattacgaggacagttatgaagatatttcagcatacttgctgagtaaaaacaatgccattgaaccaagaagcttctctcaaaacggcgcgccaagtcccgctggaagcccaactagcaccgaagaggggacctcagagtccgccacccccgagtccggccctggctctgagcctgccactagcggctccgagactcctggcacatccgaaagcgctacacccgagagtggacccggcacctctaccgagcccagtgagggctccgcccctggaacaagcaccgagcccagcgaaggcagcgccccagggacctccacagagcccagtgaaggcagtgctcctggcaccagcaccgaaccaagcgagggctctgcacccgggacctccaccgagccaagcgaaggctctgcccctggcacttccaccgagcccagcgaaggcagcgcccctgggagccccgctggctctcccaccagcactgaggagggcacatctaccgaaccaagtgaaggctctgcaccaggtgcctcgagcccaccagtcttgaaacgccatcaagctgaaataactcgtactactcttcagtcagatcaagaggaaatcgattatgatgataccatatcagttgaaatgaagaaggaagattttgacatttatgatgaggatgaaaatcagagcccccgcagctttcaaaagaaaacacgacactattttattgctgcagtggagaggctctgggattatgggatgagtagctccccacatgttctaagaaacagggctcagggcgcgccaggtacacccggatcgggtacagcgtcatcgagccccggtgcgtcacctggtacgtcgagcacggggtcgccaggggcgtcccctgggacgtcctcaacaggctcgcccggtgcgtcacccggcacgtcgtccacgggttcacctggtagctccccttccgcgtccactggcaccgggcctggaactccggggagcggcacagcgagctcgtcgccgggagcatcgcctgggacatcgagcaccgggtcgccaggagcatcgcccggaacatccagcacaggaagccccggcgcgtcgcccgggacatcaagcacaggttccccgggatcgagcacgccgtccggagccactggatcaccagggagctcgacaccttccggcgcaacgggatcgcccggagccagcccgggtacgtcaagcactggctcccctgcctcgagcagggctcagagtggcagtgtccctcagttcaagaaagttgttttccaggaatttactgatggctcctttactcagcccttataccgtggagaactaaatgaacatttgggactcctggggccatatataagagcagaagttgaagataatatcatggtaactttcagaaatcaggcctctcgtccctattccttctattctagccttatttcttatgaggaagatcagaggcaaggagcagaacctagaaaaaactttgtcaagcctaatgaaaccaaaacttacttttggaaagtgcaacatcatatggcacccactaaagatgagtttgactgcaaagcctgggcttatttctctgatgttgacctggaaaaagatgtgcactcaggcctgattggaccccttctggtctgccacactaacacactgaaccctgctcatgggagacaagtgacagtacaggaatttgctctgtttttcaccatctttgatgagaccaaaagctggtacttcactgaaaatatggaaagaaactgcagggctccctgcaatatccagatggaagatcccacttttaaagagaattatcgcttccatgcaatcaatggctacataatggatacactacctggcttagtaatggctcaggatcaaaggattcgatggtatctgctcagcatgggcagcaatgaaaacatccattctattcatttcagtggacatgtgttcactgtacgaaaaaaagaggagtataaaatggcactgtacaatctctatccaggtgtttttgagacagtggaaatgttaccatccaaagctggaatttggcgggtggaatgccttattggcgagcatctacatgctgggatgagcacactttttctggtgtacagcaataagtgtcagactcccctgggaatggcttctggacacattagagattttcagattacagcttcaggacaatatggacagtgggccccaaagctggccagacttcattattccggatcaatcaatgcctggagcaccaaggagcccttttcttggatcaaggtggatctgttggcaccaatgattattcacggcatcaagacccagggtgcccgtcagaagttctccagcctctacatctctcagtttatcatcatgtatagtcttgatgggaagaagtggcagacttatcgaggaaattccactggaaccttaatggtcttctttggcaatgtggattcatctgggataaaacacaatatttttaaccctccaattattgctcgatacatccgtttgcacccaactcattatagcattcgcagcactcttcgcatggagttgatgggctgtgatttaaatagttgcagcatgccattgggaatggagagtaaagcaatatcagatgcacagattactgcttcatcctactttaccaatatgtttgccacctggtctccttcaaaagctcgacttcacctccaagggaggagtaatgcctggagacctcaggtgaataatccaaaagagtggctgcaagtggacttccagaagacaatgaaagtcacaggagtaactactcagggagtaaaatctctgcttaccagcatgtatgtgaaggagttcctcatctccagcagtcaagatggccatcagtggactctcttttttcagaatggcaaagtaaaggtttttcagggaaatcaagactccttcacacctgtggtgaactctctagacccaccgttactgactcgctaccttcgaattcacccccagagttgggtgcaccagattgccctgaggatggaggttctgggctgcgaggcacaggacctctacggcgcgccaggtacctcagagtctgctacccccgagtcagggccaggatcagagccagccacctccgggtctgagacacccgggacttccgagagtgccacccctgagtccggacccgggtccgagcccgccacttccggctccgaaactcccggcacaagcgagagcgctaccccagagtcaggaccaggaacatctacagagccctctgaaggctccgctccagggtccccagccggcagtcccactagcaccgaggagggaacctctgaaagcgccacacccgaatcagggccagggtctgagcctgctaccagcggcagcgagacaccaggcacctctgagtccgccacaccagagtccggacccggatctcccgctgggagccccacctccactgaggagggatctcctgctggctctccaacatctactgaggaaggtacctcaaccgagccatccgagggatcagctcccggcacctcagagtcggcaaccccggagtctggacccggaacttccgaaagtgccacaccagagtccggtcccgggacttcagaatcagcaacacccgagtccggccctgggtctgaacccgccacaagtggtagtgagacaccaggatcagaacctgctacctcagggtcagagacacccggatctccggcaggctcaccaacctccactgaggagggcaccagcacagaaccaagcgagggctccgcacccggaacaagcactgaacccagtgagggttcagcacccggctctgagccggccacaagtggcagtgagacacccggcacttcagagagtgccacccccgagagtggcccaggcactagtaccgagccctctgaaggcagtgcgccagcctcgagcgaacaaaaactcatctcagaagaggatctgtcacctgcaaccggtcatcatcaccatcaccattga

SEQ ID NO: 1299 - protein, 2206 aa, synthetic construct
  REGION 1..2206: note = Description of Artificial Sequence: Synthetic polypeptide
ATRRYYLGAVELSWDYMQSDLGELPVDARFPPRVPKSFPFNTSVVYKKTLFVEFTDHLFNIAKPRPPWMGLLGPTIQAEVYDTVVITLKNMASHPVSLHAVGVSYWKASEGAEYDDQTSQREKEDDKVFPGGSHTYVWQVLKENGPMASDPLCLTYSYLSHVDLVKDLNSGLIGALLVCREGSLAKEKTQTLHKFILLFAVFDEGKSWHSETKNSLMQDRDAASARAWPKMHTVNGYVNRSLPGLIGCHRKSVYWHVIGMGTTPEVHSIFLEGHTFLVRNHRQASLEISPITFLTAQTLLMDLGQFLLFCHISSHQHDGMEAYVKVDSCPEEPQLRMKNNEEAEDYDDDLTDSEMDVVRFDDDNSPSFIQIRSVAKKHPKTWVHYIAAEEEDWDYAPLVLAPDGAPGASPGTSSTGSPGSSPSASTGTGPGSSPSASTGTGPGTPGSGTASSSPGSSTPSGATGSPGSSPSASTGTGPGASPGTSSTGSPGTPGSGTASSSPGSSTPSGATGSPGTPGSGTASSSPGASPGTSSTGSPGASPGTSSTGSPASSDRSYKSQYLNNGPQRIGRKYKKVRFMAYTDETFKTREAIQHESGILGPLLYGEVGDTLLIIFKNQASRPYNIYPHGITDVRPLYSRRLPKGVKHLKDFPILPGEIFKYKWTVTVEDGPTKSDPRCLTRYYSSFVNMERDLASGLIGPLLICYKESVDQRGNQIMSDKRNVILFSVFDENRSWYLTENIQRFLPNPAGVQLEDPEFQASNIMHSINGYVFDSLQLSVCLHEVAYWYILSIGAQTDFLSVFFSGYTFKHKMVYEDTLTLFPFSGETVFMSMENPGLWILGCHNSDFRNRGMTALLKVSSCDKNTGDYYEDSYEDISAYLLSKNNAIEPRSFSQNGAPSPAGSPTSTEEGTSESATPESGPGSEPATSGSETPGTSESATPESGPGTSTEPSEGSAPGTSTEPSEGSAPGTSTEPSEGSAPGTSTEPSEGSAPGTSTEPSEGSAPGTSTEPSEGSAPGSPAGSPTSTEEGTSTEPSEGSAPGASSPPVLKRHQAEITRTTLQSDQEEIDYDDTISVEMKKEDFDIYDEDENQSPRSFQKKTRHYFIAAVERLWDYGMSSSPHVLRNRAQGAPGTPGSGTASSSPGASPGTSSTGSPGASPGTSSTGSPGASPGTSSTGSPGSSPSASTGTGPGTPGSGTASSSPGASPGTSSTGSPGASPGTSSTGSPGASPGTSSTGSPGSSTPSGATGSPGSSTPSGATGSPGASPGTSSTGSPASSRAQSGSVPQFKKVVFQEFTDGSFTQPLYRGELNEHLGLLGPYIRAEVEDNIMVTFRNQASRPYSFYSSLISYEEDQRQGAEPRKNFVKPNETKTYFWKVQHHMAPTKDEFDCKAWAYFSDVDLEKDVHSGLIGPLLVCHTNTLNPAHGRQVTVQEFALFFTIFDETKSWYFTENMERNCRAPCNIQMEDPTFKENYRFHAINGYIMDTLPGLVMAQDQRIRWYLLSMGSNENIHSIHFSGHVFTVRKKEEYKMALYNLYPGVFETVEMLPSKAGIWRVECLIGEHLHAGMSTLFLVYSNKCQTPLGMASGHIRDFQITASGQYGQWAPKLARLHYSGSINAWSTKEPFSWIKVDLLAPMIIHGIKTQGARQKFSSLYISQFIIMYSLDGKKWQTYRGNSTGTLMVFFGNVDSSGIKHNIFNPPIIARYIRLHPTHYSIRSTLRMELMGCDLNSCSMPLGMESKAISDAQITASSYFTNMFATWSPSKARLHLQGRSNAWRPQVNNPKEWLQVDFQKTMKVTGVTTQGVKSLLTSMYVKEFLISSSQDGHQWTLFFQNGKVKVFQGNQDSFTPVVNSLDPPLLTRYLRIHPQSWVHQIALRMEVLGCEAQDLYGAPGTSESATPESGPGSEPATSGSETPGTSESATPESGPGSEPATSGSETPGTSESATPESGPGTSTEPSEGSAPGSPAGSPTSTEEGTSESATPESGPGSEPATSGSETPGTSESATPESGPGSPAGSPTSTEEGSPAGSPTSTEEGTSTEPSEGSAPGTSESATPESGPGTSESATPESGPGTSESATPESGPGSEPATSGSETPGSEPATSGSETPGSPAGSPTSTEEGTSTEPSEGSAPGTSTEPSEGSAPGSEPATSGSETPGTSESATPESGPGTSTEPSEGSAPASSEQKLISEEDLSPATGHHHHHH

SEQ ID NO: 1300 - DNA, 6621 bp, synthetic construct
  misc_feature 1..6621: note = Description of Artificial Sequence: Synthetic polynucleotide
  source 1..6621: mol_type = other DNA
gccaccagaagatactacctgggtgcagtggaactgtcatgggactatatgcaaagtgatctcggtgagctgcctgtggacgcaagatttcctcctagagtgccaaaatcttttccattcaacacctcagtcgtgtacaaaaagactctgtttgtagaattcacggatcaccttttcaacatcgctaagccaaggccaccctggatgggtctgctaggtcctaccatccaggctgaggtttatgatacagtggtcattacacttaagaacatggcttcccatcctgtcagtcttcatgctgttggtgtatcctactggaaagcttctgagggagctgaatatgatgatcagaccagtcaaagggagaaagaagatgataaagtcttccctggtggaagccatacatatgtctggcaggtcctgaaagagaatggtccaatggcctctgacccactgtgccttacctactcatatctttctcatgtggacctggtaaaagacttgaattcaggcctcattggagccctactagtatgtagagaagggagtctggccaaggaaaagacacagaccttgcacaaatttatactactttttgctgtatttgatgaagggaaaagttggcactcagaaacaaagaactccttgatgcaggatagggatgctgcatctgctcgggcctggcctaaaatgcacacagtcaatggttatgtaaacaggtctctgccaggtctgattggatgccacaggaaatcagtctattggcatgtgattggaatgggcaccactcctgaagtgcactcaatattcctcgaaggtcacacatttcttgtgaggaaccatcgccaggctagcttggaaatctcgccaataactttccttactgctcaaacactcttgatggaccttggacagtttctactgttttgtcatatctcttcccaccaacatgatggcatggaagcttatgtcaaagtagacagctgtccagaggaaccccaactacgaatgaaaaataatgaagaagcggaagactatgatgatgatcttactgattctgaaatggatgtggtcaggtttgatgatgacaactctccttcctttatccaaattcgctcagttgccaagaagcatcctaaaacttgggtacattacattgctgctgaagaggaggactgggactatgctcccttagtcctcgcccccgatggcgcgccaggtgcctcgccgggaacatcatcaactggttcacccgggtcatccccctcggcctcaaccgggacgggtcccggctcatcccccagcgccagcactggaacaggtcctggcactcctggttccggtacggcatcgtcatccccgggaagctcaacaccgtccggagcgacaggatcacctggctcgtcaccttcggcgtcaactggaacggggccaggggcctcacccggaacgtcctcgactgggtcgcctggtacgccgggatcaggaacggcctcatcctcgcctgggtcctcaacgccctcgggtgcgactggttcgccgggaactcctggctcggggacggcctcgtcgtcgcctggggcatcaccggggacgagctccacggggtcccctggagcgtcaccggggacctcctcgacaggtagcccggcctcgagcgacagaagttataaaagtcaatatttgaacaatggccctcagcggattggtaggaagtacaaaaaagtccgatttatggcatacacagatgaaacctttaagactcgtgaagctattcagcatgaatcaggaatcttgggacctttactttatggggaagttggagacacactgttgattatatttaagaatcaagcaagcagaccatataacatctaccctcacggaatcactgatgtccgtcctttgtattcaaggagattaccaaaaggtgtaaaacatttgaaggattttccaattctgccaggagaaatattcaaatataaatggacagtgactgtagaagatgggccaactaaatcagatcctcggtgcctgacccgctattactctagtttcgttaatatggagagagatctagcttcaggactcattggccctctcctcatctgctacaaagaatctgtagatcaaagaggaaaccagataatgtcagacaagaggaatgtcatcctgttttctgtatttgatgagaaccgaagctggtacctcacagagaatatacaacgctttctccccaatccagctggagtgcagcttgaggatccagagttccaagcctccaacatcatgcacagcatcaatggctatgtttttgatagtttgcagttgtcagtttgtttgcatgaggtggcatactggtacattctaagcattggagcacagactgacttcctttctgtcttcttctctggatataccttcaaacacaaaatggtctatgaagacacactcaccctattcccattctcaggagaaactgtcttcatgtcgatggaaaacccaggtctatggattctggggtgccacaactcagactttcggaacagaggcatgaccgccttactgaaggtttctagttgtgacaagaacactggtgattattacgaggacagttatgaagatatttcagcatacttgctgagtaaaaacaatgccattgaaccaagaagcttctctcaaaacggcgcgccaagtcccgctggaagcccaactagcaccgaagaggggacctcagagtccgccacccccgagtccggccctggctctgagcctgccactagcggctccgagactcctggcacatccgaaagcgctacacccgagagtggacccggcacctctaccgagcccagtgagggctccgcccctggaacaagcaccgagcccagcgaaggcagcgccccagggacctccacagagcccagtgaaggcagtgctcctggcaccagcaccgaaccaagcgagggctctgcacccgggacctccaccgagccaagcgaaggctctgcccctggcacttccaccgagcccagcgaaggcagcgcccctgggagccccgctggctctcccaccagcactgaggagggcacatctaccgaaccaagtgaaggctctgcaccaggtgcctcgagcccaccagtcttgaaacgccatcaagctgaaataactcgtactactcttcagtcagatcaagaggaaatcgattatgatgataccatatcagttgaaatgaagaaggaagattttgacatttatgatgaggatgaaaatcagagcccccgcagctttcaaaagaaaacacgacactattttattgctgcagtggagaggctctgggattatgggatgagtagctccccacatgttctaagaaacagggctcagggcgcgccaggtacacccggatcgggtacagcgtcatcgagccccggtgcgtcacctggtacgtcgagcacggggtcgccaggggcgtcccctgggacgtcctcaacaggctcgcccggtgcgtcacccggcacgtcgtccacgggttcacctggtagctccccttccgcgtccactggcaccgggcctggaactccggggagcggcacagcgagctcgtcgccgggagcatcgcctgggacatcgagcaccgggtcgccaggagcatcgcccggaacatccagcacaggaagccccggcgcgtcgcccgggacatcaagcacaggttccccgggatcgagcacgccgtccggagccactggatcaccagggagctcgacaccttccggcgcaacgggatcgcccggagccagcccgggtacgtcaagcactggctcccctgcctcgagcagggctcagagtggcagtgtccctcagttcaagaaagttgttttccaggaatttactgatggctcctttactcagcccttataccgtggagaactaaatgaacatttgggactcctggggccatatataagagcagaagttgaagataatatcatggtaactttcagaaatcaggcctctcgtccctattccttctattctagccttatttcttatgaggaagatcagaggcaaggagcagaacctagaaaaaactttgtcaagcctaatgaaaccaaaacttacttttggaaagtgcaacatcatatggcacccactaaagatgagtttgactgcaaagcctgggcttatttctctgatgttgacctggaaaaagatgtgcactcaggcctgattggaccccttctggtctgccacactaacacactgaaccctgctcatgggagacaagtgacagtacaggaatttgctctgtttttcaccatctttgatgagaccaaaagctggtacttcactgaaaatatggaaagaaactgcagggctccctgcaatatccagatggaagatcccacttttaaagagaattatcgcttccatgcaatcaatggctacataatggatacactacctggcttagtaatggctcaggatcaaaggattcgatggtatctgctcagcatgggcagcaatgaaaacatccattctattcatttcagtggacatgtgttcactgtacgaaaaaaagaggagtataaaatggcactgtacaatctctatccaggtgtttttgagacagtggaaatgttaccatccaaagctggaatttggcgggtggaatgccttattggcgagcatctacatgctgggatgagcacactttttctggtgtacagcaataagtgtcagactcccctgggaatggcttctggacacattagagattttcagattacagcttcaggacaatatggacagtgggccccaaagctggccagacttcattattccggatcaatcaatgcctggagcaccaaggagcccttttcttggatcaaggtggatctgttggcaccaatgattattcacggcatcaagacccagggtgcccgtcagaagttctccagcctctacatctctcagtttatcatcatgtatagtcttgatgggaagaagtggcagacttatcgaggaaattccactggaaccttaatggtcttctttggcaatgtggattcatctgggataaaacacaatatttttaaccctccaattattgctcgatacatccgtttgcacccaactcattatagcattcgcagcactcttcgcatggagttgatgggctgtgatttaaatagttgcagcatgccattgggaatggagagtaaagcaatatcagatgcacagattactgcttcatcctactttaccaatatgtttgccacctggtctccttcaaaagctcgacttcacctccaagggaggagtaatgcctggagacctcaggtgaataatccaaaagagtggctgcaagtggacttccagaagacaatgaaagtcacaggagtaactactcagggagtaaaatctctgcttaccagcatgtatgtgaaggagttcctcatctccagcagtcaagatggccatcagtggactctcttttttcagaatggcaaagtaaaggtttttcagggaaatcaagactccttcacacctgtggtgaactctctagacccaccgttactgactcgctaccttcgaattcacccccagagttgggtgcaccagattgccctgaggatggaggttctgggctgcgaggcacaggacctctacggcgcgccaggtacctcagagtctgctacccccgagtcagggccaggatcagagccagccacctccgggtctgagacacccgggacttccgagagtgccacccctgagtccggacccgggtccgagcccgccacttccggctccgaaactcccggcacaagcgagagcgctaccccagagtcaggaccaggaacatctacagagccctctgaaggctccgctccagggtccccagccggcagtcccactagcaccgaggagggaacctctgaaagcgccacacccgaatcagggccagggtctgagcctgctaccagcggcagcgagacaccaggcacctctgagtccgccacaccagagtccggacccggatctcccgctgggagccccacctccactgaggagggatctcctgctggctctccaacatctactgaggaaggtacctcaaccgagccatccgagggatcagctcccggcacctcagagtcggcaaccccggagtctggacccggaacttccgaaagtgccacaccagagtccggtcccgggacttcagaatcagcaacacccgagtccggccctgggtctgaacccgccacaagtggtagtgagacaccaggatcagaacctgctacctcagggtcagagacacccggatctccggcaggctcaccaacctccactgaggagggcaccagcacagaaccaagcgagggctccgcacccggaacaagcactgaacccagtgagggttcagcacccggctctgagccggccacaagtggcagtgagacacccggcacttcagagagtgccacccccgagagtggcccaggcactagtaccgagccctctgaaggcagtgcgccagcctcgagcgaacaaaaactcatctcagaagaggatctgtcacctgcaaccggtcatcatcaccatcaccattga

SEQ ID NO: 1301 - protein, 2203 aa, synthetic construct
  REGION 1..2203: note = Description of Artificial Sequence: Synthetic polypeptide
ATRRYYLGAVELSWDYMQSDLGELPVDARFPPRVPKSFPFNTSVVYKKTLFVEFTDHLFNIAKPRPPWMGLLGPTIQAEVYDTVVITLKNMASHPVSLHAVGVSYWKASEGAEYDDQTSQREKEDDKVFPGGSHTYVWQVLKENGPMASDPLCLTYSYLSHVDLVKDLNSGLIGALLVCREGSLAKEKTQTLHKFILLFAVFDEGKSWHSETKNSLMQDRDAASARAWPKMHTVNGYVNRSLPGLIGCHRKSVYWHVIGMGTTPEVHSIFLEGHTFLVRNHRQASLEISPITFLTAQTLLMDLGQFLLFCHISSHQHDGMEAYVKVDSCPEEPQLRMKNNEEAEDYDDDLTDSEMDVVRFDDDNSPSFIQIRSVAKKHPKTWVHYIAAEEEDWDYAPLVLAPDGAPGASPGTSSTGSPGSSPSASTGTGPGSSPSASTGTGPGTPGSGTASSSPGSSTPSGATGSPGSSPSASTGTGPGASPGTSSTGSPGTPGSGTASSSPGSSTPSGATGSPGTPGSGTASSSPGASPGTSSTGSPGASPGTSSTGSPASSDRSYKSQYLNNGPQRIGRKYKKVRFMAYTDETFKTREAIQHESGILGPLLYGEVGDTLLIIFKNQASRPYNIYPHGITDVRPLYSRRLPKGVKHLKDFPILPGEIFKYKWTVTVEDGPTKSDPRCLTRYYSSFVNMERDLASGLIGPLLICYKESVDQRGNQIMSDKRNVILFSVFDENRSWYLTENIQRFLPNPAGVQLEDPEFQASNIMHSINGYVFDSLQLSVCLHEVAYWYILSIGAQTDFLSVFFSGYTFKHKMVYEDTLTLFPFSGETVFMSMENPGLWILGCHNSDFRNRGMTALLKVSSCDKNTGDYYEDSYEDISAYLLSKNNAIEPRSFSQNGAPSPAGSPTSTEEGTSESATPESGPGSEPATSGSETPGTSESATPESGPGTSTEPSEGSAPGTSTEPSEGSAPGTSTEPSEGSAPGTSTEPSEGSAPGTSTEPSEGSAPGTSTEPSEGSAPGSPAGSPTSTEEGTSTEPSEGSAPGASSPPVLKRHQAEITRTTLQSDQEEIDYDDTISVEMKKEDFDIYDEDENQSPRSFQKKTRHYFIAAVERLWDYGMSSSPHVLRNRAQSGSVPQFKKVVFQEFTDGSFTQPLYRGELNEHLGLLGPYIRAEVEDNIMVTFRNQASRPYSFYSSLISYEEDQRQGAEPRKNFVKPNETKTYFWKVQHHMAPTKDEFDCKAWAYFSDVDLEKDVHSGLIGPLLVCHTNTLNPAHGRQVTVQEFALFFTIFDETKSWYFTENMERNCRGAPSPAGSPTSTEEGTSESATPESGPGTSTEPSEGSAPGSPAGSPTSTEEGTSTEPSEGSAPGTSTEPSEGSAPGTSESATPESGPGSEPATSGSETPGSEPATSGSETPGSPAGSPTSTEEGTSESATPESGPGTSTEPSEGSAPGASSAPCNIQMEDPTFKENYRFHAINGYIMDTLPGLVMAQDQRIRWYLLSMGSNENIHSIHFSGHVFTVRKKEEYKMALYNLYPGVFETVEMLPSKAGIWRVECLIGEHLHAGMSTLFLVYSNKCQTPLGMASGHIRDFQITASGQYGQWAPKLARLHYSGSINAWSTKEPFSWIKVDLLAPMIIHGIKTQGARQKFSSLYISQFIIMYSLDGKKWQTYRGNSTGTLMVFFGNVDSSGIKHNIFNPPIIARYIRLHPTHYSIRSTLRMELMGCDLNSCSMPLGMESKAISDAQITASSYFTNMFATWSPSKARLHLQGRSNAWRPQVNNPKEWLQVDFQKTMKVTGVTTQGVKSLLTSMYVKEFLISSSQDGHQWTLFFQNGKVKVFQGNQDSFTPVVNSLDPPLLTRYLRIHPQSWVHQIALRMEVLGCEAQDLYGAPGTSESATPESGPGSEPATSGSETPGTSESATPESGPGSEPATSGSETPGTSESATPESGPGTSTEPSEGSAPGSPAGSPTSTEEGTSESATPESGPGSEPATSGSETPGTSESATPESGPGSPAGSPTSTEEGSPAGSPTSTEEGTSTEPSEGSAPGTSESATPESGPGTSESATPESGPGTSESATPESGPGSEPATSGSETPGSEPATSGSETPGSPAGSPTSTEEGTSTEPSEGSAPGTSTEPSEGSAPGSEPATSGSETPGTSESATPESGPGTSTEPSEGSAPASSEQKLISEEDLSPATGHHHHHH

SEQ ID NO: 1302 - DNA, 6612 bp, synthetic construct
  misc_feature 1..6612: note = Description of Artificial Sequence: Synthetic polynucleotide
  source 1..6612: mol_type = other DNA
gccaccagaagatactacctgggtgcagtggaactgtcatgggactatatgcaaagtgatctcggtgagctgcctgtggacgcaagatttcctcctagagtgccaaaatcttttccattcaacacctcagtcgtgtacaaaaagactctgtttgtagaattcacggatcaccttttcaacatcgctaagccaaggccaccctggatgggtctgctaggtcctaccatccaggctgaggtttatgatacagtggtcattacacttaagaacatggcttcccatcctgtcagtcttcatgctgttggtgtatcctactggaaagcttctgagggagctgaatatgatgatcagaccagtcaaagggagaaagaagatgataaagtcttccctggtggaagccatacatatgtctggcaggtcctgaaagagaatggtccaatggcctctgacccactgtgccttacctactcatatctttctcatgtggacctggtaaaagacttgaattcaggcctcattggagccctactagtatgtagagaagggagtctggccaaggaaaagacacagaccttgcacaaatttatactactttttgctgtatttgatgaagggaaaagttggcactcagaaacaaagaactccttgatgcaggatagggatgctgcatctgctcgggcctggcctaaaatgcacacagtcaatggttatgtaaacaggtctctgccaggtctgattggatgccacaggaaatcagtctattggcatgtgattggaatgggcaccactcctgaagtgcactcaatattcctcgaaggtcacacatttcttgtgaggaaccatcgccaggctagcttggaaatctcgccaataactttccttactgctcaaacactcttgatggaccttggacagtttctactgttttgtcatatctcttcccaccaacatgatggcatggaagcttatgtcaaagtagacagctgtccagaggaaccccaactacgaatgaaaaataatgaagaagcggaagactatgatgatgatcttactgattctgaaatggatgtggtcaggtttgatgatgacaactctccttcctttatccaaattcgctcagttgccaagaagcatcctaaaacttgggtacattacattgctgctgaagaggaggactgggactatgctcccttagtcctcgcccccgatggcgcgccaggtgcctcgccgggaacatcatcaactggttcacccgggtcatccccctcggcctcaaccgggacgggtcccggctcatcccccagcgccagcactggaacaggtcctggcactcctggttccggtacggcatcgtcatccccgggaagctcaacaccgtccggagcgacaggatcacctggctcgtcaccttcggcgtcaactggaacggggccaggggcctcacccggaacgtcctcgactgggtcgcctggtacgccgggatcaggaacggcctcatcctcgcctgggtcctcaacgccctcgggtgcgactggttcgccgggaactcctggctcggggacggcctcgtcgtcgcctggggcatcaccggggacgagctccacggggtcccctggagcgtcaccggggacctcctcgacaggtagcccggcctcgagcgacagaagttataaaagtcaatatttgaacaatggccctcagcggattggtaggaagtacaaaaaagtccgatttatggcatacacagatgaaacctttaagactcgtgaagctattcagcatgaatcaggaatcttgggacctttactttatggggaagttggagacacactgttgattatatttaagaatcaagcaagcagaccatataacatctaccctcacggaatcactgatgtccgtcctttgtattcaaggagattaccaaaaggtgtaaaacatttgaaggattttccaattctgccaggagaaatattcaaatataaatggacagtgactgtagaagatgggccaactaaatcagatcctcggtgcctgacccgctattactctagtttcgttaatatggagagagatctagcttcaggactcattggccctctcctcatctgctacaaagaatctgtagatcaaagaggaaaccagataatgtcagacaagaggaatgtcatcctgttttctgtatttgatgagaaccgaagctggtacctcacagagaatatacaacgctttctccccaatccagctggagtgcagcttgaggatccagagttccaagcctccaacatcatgcacagcatcaatggctatgtttttgatagtttgcagttgtcagtttgtttgcatgaggtggcatactggtacattctaagcattggagcacagactgacttcctttctgtcttcttctctggatataccttcaaacacaaaatggtctatgaagacacactcaccctattcccattctcaggagaaactgtcttcatgtcgatggaaaacccaggtctatggattctggggtgccacaactcagactttcggaacagaggcatgaccgccttactgaaggtttctagttgtgacaagaacactggtgattattacgaggacagttatgaagatatttcagcatacttgctgagtaaaaacaatgccattgaaccaagaagcttctctcaaaacggcgcgccaagtcccgctggaagcccaactagcaccgaagaggggacctcagagtccgccacccccgagtccggccctggctctgagcctgccactagcggctccgagactcctggcacatccgaaagcgctacacccgagagtggacccggcacctctaccgagcccagtgagggctccgcccctggaacaagcaccgagcccagcgaaggcagcgccccagggacctccacagagcccagtgaaggcagtgctcctggcaccagcaccgaaccaagcgagggctctgcacccgggacctccaccgagccaagcgaaggctctgcccctggcacttccaccgagcccagcgaaggcagcgcccctgggagccccgctggctctcccaccagcactgaggagggcacatctaccgaaccaagtgaaggctctgcaccaggtgcctcgagcccaccagtcttgaaacgccatcaagctgaaataactcgtactactcttcagtcagatcaagaggaaatcgattatgatgataccatatcagttgaaatgaagaaggaagattttgacatttatgatgaggatgaaaatcagagcccccgcagctttcaaaagaaaacacgacactattttattgctgcagtggagaggctctgggattatgggatgagtagctccccacatgttctaagaaacagggctcagagtggcagtgtccctcagttcaagaaagttgttttccaggaatttactgatggctcctttactcagcccttataccgtggagaactaaatgaacatttgggactcctggggccatatataagagcagaagttgaagataatatcatggtaactttcagaaatcaggcctctcgtccctattccttctattctagccttatttcttatgaggaagatcagaggcaaggagcagaacctagaaaaaactttgtcaagcctaatgaaaccaaaacttacttttggaaagtgcaacatcatatggcacccactaaagatgagtttgactgcaaagcctgggcttatttctctgatgttgacctggaaaaagatgtgcactcaggcctgattggaccccttctggtctgccacactaacacactgaaccctgctcatgggagacaagtgacagtacaggaatttgctctgtttttcaccatctttgatgagaccaaaagctggtacttcactgaaaatatggaaagaaactgcaggggcgcgccatctccagccgggtccccaacttcgaccgaggaagggacctccgagtcagctaccccggagtccggtcctggcacctccaccgaaccatcggagggcagcgcccctgggagccctgccgggagccctacaagcaccgaagagggcaccagtacagagccaagtgaggggagcgcccctggtactagtactgaaccatccgaggggtcagctccaggcacgagtgagtccgctacccccgagagcggaccgggctcagagcccgccacgagtggcagtgaaactccaggctcagaacccgccactagtgggtcagagactccaggcagccctgccggatcccctacgtccaccgaggagggaacatctgagtccgcaacacccgaatccggtccaggcacctccacggaacctagtgaaggctcggcaccaggtgcctcgagcgctccctgcaatatccagatggaagatcccacttttaaagagaattatcgcttccatgcaatcaatggctacataatggatacactacctggcttagtaatggctcaggatcaaaggattcgatggtatctgctcagcatgggcagcaatgaaaacatccattctattcatttcagtggacatgtgttcactgtacgaaaaaaagaggagtataaaatggcactgtacaatctctatccaggtgtttttgagacagtggaaatgttaccatccaaagctggaatttggcgggtggaatgccttattggcgagcatctacatgctgggatgagcacactttttctggtgtacagcaataagtgtcagactcccctgggaatggcttctggacacattagagattttcagattacagcttcaggacaatatggacagtgggccccaaagctggccagacttcattattccggatcaatcaatgcctggagcaccaaggagcccttttcttggatcaaggtggatctgttggcaccaatgattattcacggcatcaagacccagggtgcccgtcagaagttctccagcctctacatctctcagtttatcatcatgtatagtcttgatgggaagaagtggcagacttatcgaggaaattccactggaaccttaatggtcttctttggcaatgtggattcatctgggataaaacacaatatttttaaccctccaattattgctcgatacatccgtttgcacccaactcattatagcattcgcagcactcttcgcatggagttgatgggctgtgatttaaatagttgcagcatgccattgggaatggagagtaaagcaatatcagatgcacagattactgcttcatcctactttaccaatatgtttgccacctggtctccttcaaaagctcgacttcacctccaagggaggagtaatgcctggagacctcaggtgaataatccaaaagagtggctgcaagtggacttccagaagacaatgaaagtcacaggagtaactactcagggagtaaaatctctgcttaccagcatgtatgtgaaggagttcctcatctccagcagtcaagatggccatcagtggactctcttttttcagaatggcaaagtaaaggtttttcagggaaatcaagactccttcacacctgtggtgaactctctagacccaccgttactgactcgctaccttcgaattcacccccagagttgggtgcaccagattgccctgaggatggaggttctgggctgcgaggcacaggacctctacggcgcgccaggtacctcagagtctgctacccccgagtcagggccaggatcagagccagccacctccgggtctgagacacccgggacttccgagagtgccacccctgagtccggacccgggtccgagcccgccacttccggctccgaaactcccggcacaagcgagagcgctaccccagagtcaggaccaggaacatctacagagccctctgaaggctccgctccagggtccccagccggcagtcccactagcaccgaggagggaacctctgaaagcgccacacccgaatcagggccagggtctgagcctgctaccagcggcagcgagacaccaggcacctctgagtccgccacaccagagtccggacccggatctcccgctgggagccccacctccactgaggagggatctcctgctggctctccaacatctactgaggaaggtacctcaaccgagccatccgagggatcagctcccggcacctcagagtcggcaaccccggagtctggacccggaacttccgaaagtgccacaccagagtccggtcccgggacttcagaatcagcaacacccgagtccggccctgggtctgaacccgccacaagtggtagtgagacaccaggatcagaacctgctacctcagggtcagagacacccggatctccggcaggctcaccaacctccactgaggagggcaccagcacagaaccaagcgagggctccgcacccggaacaagcactgaacccagtgagggttcagcacccggctctgagccggccacaagtggcagtgagacacccggcacttcagagagtgccacccccgagagtggcccaggcactagtaccgagccctctgaaggcagtgcgccagcctcgagcgaacaaaaactcatctcagaagaggatctgtcacctgcaaccggtcatcatcaccatcaccattga

SEQ ID NO: 1303 - protein, 2203 aa, synthetic construct
  REGION 1..2203: note = Description of Artificial Sequence: Synthetic polypeptide
ATRRYYLGAVELSWDYMQSDLGELPVDARFPPRVPKSFPFNTSVVYKKTLFVEFTDHLFNIAKPRPPWMGLLGPTIQAEVYDTVVITLKNMASHPVSLHAVGVSYWKASEGAEYDDQTSQREKEDDKVFPGGSHTYVWQVLKENGPMASDPLCLTYSYLSHVDLVKDLNSGLIGALLVCREGSLAKEKTQTLHKFILLFAVFDEGKSWHSETKNSLMQDRDAASARAWPKMHTVNGYVNRSLPGLIGCHRKSVYWHVIGMGTTPEVHSIFLEGHTFLVRNHRQASLEISPITFLTAQTLLMDLGQFLLFCHISSHQHDGMEAYVKVDSCPEEPQLRMKNNEEAEDYDDDLTDSEMDVVRFDDDNSPSFIQIRSVAKKHPKTWVHYIAAEEEDWDYAPLVLAPDGAPTSTEPSEGSAPGSPAGSPTSTEEGTSTEPSEGSAPGTSTEPSEGSAPGTSESATPESGPGTSTEPSEGSAPGTSESATPESGPGSEPATSGSETPGTSTEPSEGSAPGTSTEPSEGSAPGTSESATPESGPGTSESATPESGPGASSDRSYKSQYLNNGPQRIGRKYKKVRFMAYTDETFKTREAIQHESGILGPLLYGEVGDTLLIIFKNQASRPYNIYPHGITDVRPLYSRRLPKGVKHLKDFPILPGEIFKYKWTVTVEDGPTKSDPRCLTRYYSSFVNMERDLASGLIGPLLICYKESVDQRGNQIMSDKRNVILFSVFDENRSWYLTENIQRFLPNPAGVQLEDPEFQASNIMHSINGYVFDSLQLSVCLHEVAYWYILSIGAQTDFLSVFFSGYTFKHKMVYEDTLTLFPFSGETVFMSMENPGLWILGCHNSDFRNRGMTALLKVSSCDKNTGDYYEDSYEDISAYLLSKNNAIEPRSFSQNGAPSPAGSPTSTEEGTSESATPESGPGSEPATSGSETPGTSESATPESGPGTSTEPSEGSAPGTSTEPSEGSAPGTSTEPSEGSAPGTSTEPSEGSAPGTSTEPSEGSAPGTSTEPSEGSAPGSPAGSPTSTEEGTSTEPSEGSAPGASSPPVLKRHQAEITRTTLQSDQEEIDYDDTISVEMKKEDFDIYDEDENQSPRSFQKKTRHYFIAAVERLWDYGMSSSPHVLRNRAQSGSVPQFKKVVFQEFTDGSFTQPLYRGELNEHLGLLGPYIRAEVEDNIMVTFRNQASRPYSFYSSLISYEEDQRQGAEPRKNFVKPNETKTYFWKVQHHMAPTKDEFDCKAWAYFSDVDLEKDVHSGLIGPLLVCHTNTLNPAHGRQVTVQEFALFFTIFDETKSWYFTENMERNCRGAPSPAGSPTSTEEGTSESATPESGPGTSTEPSEGSAPGSPAGSPTSTEEGTSTEPSEGSAPGTSTEPSEGSAPGTSESATPESGPGSEPATSGSETPGSEPATSGSETPGSPAGSPTSTEEGTSESATPESGPGTSTEPSEGSAPGASSAPCNIQMEDPTFKENYRFHAINGYIMDTLPGLVMAQDQRIRWYLLSMGSNENIHSIHFSGHVFTVRKKEEYKMALYNLYPGVFETVEMLPSKAGIWRVECLIGEHLHAGMSTLFLVYSNKCQTPLGMASGHIRDFQITASGQYGQWAPKLARLHYSGSINAWSTKEPFSWIKVDLLAPMIIHGIKTQGARQKFSSLYISQFIIMYSLDGKKWQTYRGNSTGTLMVFFGNVDSSGIKHNIFNPPIIARYIRLHPTHYSIRSTLRMELMGCDLNSCSMPLGMESKAISDAQITASSYFTNMFATWSPSKARLHLQGRSNAWRPQVNNPKEWLQVDFQKTMKVTGVTTQGVKSLLTSMYVKEFLISSSQDGHQWTLFFQNGKVKVFQGNQDSFTPVVNSLDPPLLTRYLRIHPQSWVHQIALRMEVLGCEAQDLYGAPGTSESATPESGPGSEPATSGSETPGTSESATPESGPGSEPATSGSETPGTSESATPESGPGTSTEPSEGSAPGSPAGSPTSTEEGTSESATPESGPGSEPATSGSETPGTSESATPESGPGSPAGSPTSTEEGSPAGSPTSTEEGTSTEPSEGSAPGTSESATPESGPGTSESATPESGPGTSESATPESGPGSEPATSGSETPGSEPATSGSETPGSPAGSPTSTEEGTSTEPSEGSAPGTSTEPSEGSAPGSEPATSGSETPGTSESATPESGPGTSTEPSEGSAPASSEQKLISEEDLSPATGHHHHHH

SEQ ID NO: 1304 - DNA, 6612 bp, synthetic construct
  misc_feature 1..6612: note = Description of Artificial Sequence: Synthetic polynucleotide
  source 1..6612: mol_type = other DNA
gccaccagaagatactacctgggtgcagtggaactgtcatgggactatatgcaaagtgatctcggtgagctgcctgtggacgcaagatttcctcctagagtgccaaaatcttttccattcaacacctcagtcgtgtacaaaaagactctgtttgtagaattcacggatcaccttttcaacatcgctaagccaaggccaccctggatgggtctgctaggtcctaccatccaggctgaggtttatgatacagtggtcattacacttaagaacatggcttcccatcctgtcagtcttcatgctgttggtgtatcctactggaaagcttctgagggagctgaatatgatgatcagaccagtcaaagggagaaagaagatgataaagtcttccctggtggaagccatacatatgtctggcaggtcctgaaagagaatggtccaatggcctctgacccactgtgccttacctactcatatctttctcatgtggacctggtaaaagacttgaattcaggcctcattggagccctactagtatgtagagaagggagtctggccaaggaaaagacacagaccttgcacaaatttatactactttttgctgtatttgatgaagggaaaagttggcactcagaaacaaagaactccttgatgcaggatagggatgctgcatctgctcgggcctggcctaaaatgcacacagtcaatggttatgtaaacaggtctctgccaggtctgattggatgccacaggaaatcagtctattggcatgtgattggaatgggcaccactcctgaagtgcactcaatattcctcgaaggtcacacatttcttgtgaggaaccatcgccaggctagcttggaaatctcgccaataactttccttactgctcaaacactcttgatggaccttggacagtttctactgttttgtcatatctcttcccaccaacatgatggcatggaagcttatgtcaaagtagacagctgtccagaggaaccccaactacgaatgaaaaataatgaagaagcggaagactatgatgatgatcttactgattctgaaatggatgtggtcaggtttgatgatgacaactctccttcctttatccaaattcgctcagttgccaagaagcatcctaaaacttgggtacattacattgctgctgaagaggaggactgggactatgctcccttagtcctcgcccccgatggcgcgccaaccagtacggagccgtccgaggggagcgcaccaggaagcccggctgggagcccgacttctaccgaagagggtacatctaccgaaccaagtgaaggttcagcaccaggcacctcaacagaaccctctgagggctcggcgcctggtacaagtgagtccgccaccccagaatccgggcctgggacaagcacagaaccttcggaagggagtgcccctggaacatccgaatcggcaaccccagaatcagggccaggatctgagcccgcgacttcgggctccgagacgcctgggacatccaccgagccctccgaaggatcagccccaggcaccagcacggagccctctgagggaagcgcacctggtaccagcgaaagcgcaactcccgaatcaggtcccggtacgagcgagtcggcgaccccggagagcgggccaggtgcctcgagcgacagaagttataaaagtcaatatttgaacaatggccctcagcggattggtaggaagtacaaaaaagtccgatttatggcatacacagatgaaacctttaagactcgtgaagctattcagcatgaatcaggaatcttgggacctttactttatggggaagttggagacacactgttgattatatttaagaatcaagcaagcagaccatataacatctaccctcacggaatcactgatgtccgtcctttgtattcaaggagattaccaaaaggtgtaaaacatttgaaggattttccaattctgccaggagaaatattcaaatataaatggacagtgactgtagaagatgggccaactaaatcagatcctcggtgcctgacccgctattactctagtttcgttaatatggagagagatctagcttcaggactcattggccctctcctcatctgctacaaagaatctgtagatcaaagaggaaaccagataatgtcagacaagaggaatgtcatcctgttttctgtatttgatgagaaccgaagctggtacctcacagagaatatacaacgctttctccccaatccagctggagtgcagcttgaggatccagagttccaagcctccaacatcatgcacagcatcaatggctatgtttttgatagtttgcagttgtcagtttgtttgcatgaggtggcatactggtacattctaagcattggagcacagactgacttcctttctgtcttcttctctggatataccttcaaacacaaaatggtctatgaagacacactcaccctattcccattctcaggagaaactgtcttcatgtcgatggaaaacccaggtctatggattctggggtgccacaactcagactttcggaacagaggcatgaccgccttactgaaggtttctagttgtgacaagaacactggtgattattacgaggacagttatgaagatatttcagcatacttgctgagtaaaaacaatgccattgaaccaagaagcttctctcaaaacggcgcgccaagtcccgctggaagcccaactagcaccgaagaggggacctcagagtccgccacccccgagtccggccctggctctgagcctgccactagcggctccgagactcctggcacatccgaaagcgctacacccgagagtggacccggcacctctaccgagcccagtgagggctccgcccctggaacaagcaccgagcccagcgaaggcagcgccccagggacctccacagagcccagtgaaggcagtgctcctggcaccagcaccgaaccaagcgagggctctgcacccgggacctccaccgagccaagcgaaggctctgcccctggcacttccaccgagcccagcgaaggcagcgcccctgggagccccgctggctctcccaccagcactgaggagggcacatctaccgaaccaagtgaaggctctgcaccaggtgcctcgagcccaccagtcttgaaacgccatcaagctgaaataactcgtactactcttcagtcagatcaagaggaaatcgattatgatgataccatatcagttgaaatgaagaaggaagattttgacatttatgatgaggatgaaaatcagagcccccgcagctttcaaaagaaaacacgacactattttattgctgcagtggagaggctctgggattatgggatgagtagctccccacatgttctaagaaacagggctcagagtggcagtgtccctcagttcaagaaagttgttttccaggaatttactgatggctcctttactcagcccttataccgtggagaactaaatgaacatttgggactcctggggccatatataagagcagaagttgaagataatatcatggtaactttcagaaatcaggcctctcgtccctattccttctattctagccttatttcttatgaggaagatcagaggcaaggagcagaacctagaaaaaactttgtcaagcctaatgaaaccaaaacttacttttggaaagtgcaacatcatatggcacccactaaagatgagtttgactgcaaagcctgggcttatttctctgatgttgacctggaaaaagatgtgcactcaggcctgattggaccccttctggtctgccacactaacacactgaaccctgctcatgggagacaagtgacagtacaggaatttgctctgtttttcaccatctttgatgagaccaaaagctggtacttcactgaaaatatggaaagaaactgcaggggcgcgccatctccagccgggtccccaacttcgaccgaggaagggacctccgagtcagctaccccggagtccggtcctggcacctccaccgaaccatcggagggcagcgcccctgggagccctgccgggagccctacaagcaccgaagagggcaccagtacagagccaagtgaggggagcgcccctggtactagtactgaaccatccgaggggtcagctccaggcacgagtgagtccgctacccccgagagcggaccgggctcagagcccgccacgagtggcagtgaaactccaggctcagaacccgccactagtgggtcagagactccaggcagccctgccggatcccctacgtccaccgaggagggaacatctgagtccgcaacacccgaatccggtccaggcacctccacggaacctagtgaaggctcggcaccaggtgcctcgagcgctccctgcaatatccagatggaagatcccacttttaaagagaattatcgcttccatgcaatcaatggctacataatggatacactacctggcttagtaatggctcaggatcaaaggattcgatggtatctgctcagcatgggcagcaatgaaaacatccattctattcatttcagtggacatgtgttcactgtacgaaaaaaagaggagtataaaatggcactgtacaatctctatccaggtgtttttgagacagtggaaatgttaccatccaaagctggaatttggcgggtggaatgccttattggcgagcatctacatgctgggatgagcacactttttctggtgtacagcaataagtgtcagactcccctgggaatggcttctggacacattagagattttcagattacagcttcaggacaatatggacagtgggccccaaagctggccagacttcattattccggatcaatcaatgcctggagcaccaaggagcccttttcttggatcaaggtggatctgttggcaccaatgattattcacggcatcaagacccagggtgcccgtcagaagttctccagcctctacatctctcagtttatcatcatgtatagtcttgatgggaagaagtggcagacttatcgaggaaattccactggaaccttaatggtcttctttggcaatgtggattcatctgggataaaacacaatatttttaaccctccaattattgctcgatacatccgtttgcacccaactcattatagcattcgcagcactcttcgcatggagttgatgggctgtgatttaaatagttgcagcatgccattgggaatggagagtaaagcaatatcagatgcacagattactgcttcatcctactttaccaatatgtttgccacctggtctccttcaaaagctcgacttcacctccaagggaggagtaatgcctggagacctcaggtgaataatccaaaagagtggctgcaagtggacttccagaagacaatgaaagtcacaggagtaactactcagggagtaaaatctctgcttaccagcatgtatgtgaaggagttcctcatctccagcagtcaagatggccatcagtggactctcttttttcagaatggcaaagtaaaggtttttcagggaaatcaagactccttcacacctgtggtgaactctctagacccaccgttactgactcgctaccttcgaattcacccccagagttgggtgcaccagattgccctgaggatggaggttctgggctgcgaggcacaggacctctacggcgcgccaggtacctcagagtctgctacccccgagtcagggccaggatcagagccagccacctccgggtctgagacacccgggacttccgagagtgccacccctgagtccggacccgggtccgagcccgccacttccggctccgaaactcccggcacaagcgagagcgctaccccagagtcaggaccaggaacatctacagagccctctgaaggctccgctccagggtccccagccggcagtcccactagcaccgaggagggaacctctgaaagcgccacacccgaatcagggccagggtctgagcctgctaccagcggcagcgagacaccaggcacctctgagtccgccacaccagagtccggacccggatctcccgctgggagccccacctccactgaggagggatctcctgctggctctccaacatctactgaggaaggtacctcaaccgagccatccgagggatcagctcccggcacctcagagtcggcaaccccggagtctggacccggaacttccgaaagtgccacaccagagtccggtcccgggacttcagaatcagcaacacccgagtccggccctgggtctgaacccgccacaagtggtagtgagacaccaggatcagaacctgctacctcagggtcagagacacccggatctccggcaggctcaccaacctccactgaggagggcaccagcacagaaccaagcgagggctccgcacccggaacaagcactgaacccagtgagggttcagcacccggctctgagccggccacaagtggcagtgagacacccggcacttcagagagtgccacccccgagagtggcccaggcactagtaccgagccctctgaaggcagtgcgccagcctcgagcgaacaaaaactcatctcagaagaggatctgtcacctgcaaccggtcatcatcaccatcaccattga

SEQ ID NO: 1305 - protein, 2203 aa, synthetic construct
  REGION 1..2203: note = Description of Artificial Sequence: Synthetic polypeptide
ATRRYYLGAVELSWDYMQSDLGELPVDARFPPRVPKSFPFNTSVVYKKTLFVEFTDHLFNIAKPRPPWMGLLGPTIQAEVYDTVVITLKNMASHPVSLHAVGVSYWKASEGAEYDDQTSQREKEDDKVFPGGSHTYVWQVLKENGPMASDPLCLTYSYLSHVDLVKDLNSGLIGALLVCREGSLAKEKTQTLHKFILLFAVFDEGKSWHSETKNSLMQDRDAASARAWPKMHTVNGYVNRSLPGLIGCHRKSVYWHVIGMGTTPEVHSIFLEGHTFLVRNHRQASLEISPITFLTAQTLLMDLGQFLLFCHISSHQHDGMEAYVKVDSCPEEPQLRMKNNEEAEDYDDDLTDSEMDVVRFDDDNSPSFIQIRSVAKKHPKTWVHYIAAEEEDWDYAPLVLAPDDRSYKSGAPTSTEPSEGSAPGSPAGSPTSTEEGTSTEPSEGSAPGTSTEPSEGSAPGTSESATPESGPGTSTEPSEGSAPGTSESATPESGPGSEPATSGSETPGTSTEPSEGSAPGTSTEPSEGSAPGTSESATPESGPGTSESATPESGPGASSQYLNNGPQRIGRKYKKVRFMAYTDETFKTREAIQHESGILGPLLYGEVGDTLLIIFKNQASRPYNIYPHGITDVRPLYSRRLPKGVKHLKDFPILPGEIFKYKWTVTVEDGPTKSDPRCLTRYYSSFVNMERDLASGLIGPLLICYKESVDQRGNQIMSDKRNVILFSVFDENRSWYLTENIQRFLPNPAGVQLEDPEFQASNIMHSINGYVFDSLQLSVCLHEVAYWYILSIGAQTDFLSVFFSGYTFKHKMVYEDTLTLFPFSGETVFMSMENPGLWILGCHNSDFRNRGMTALLKVSSCDKNTGDYYEDSYEDISAYLLSKNNAIEPRSFSQNGAPSPAGSPTSTEEGTSESATPESGPGSEPATSGSETPGTSESATPESGPGTSTEPSEGSAPGTSTEPSEGSAPGTSTEPSEGSAPGTSTEPSEGSAPGTSTEPSEGSAPGTSTEPSEGSAPGSPAGSPTSTEEGTSTEPSEGSAPGASSPPVLKRHQAEITRTTLQSDQEEIDYDDTISVEMKKEDFDIYDEDENQSPRSFQKKTRHYFIAAVERLWDYGMSSSPHVLRNRAQSGSVPQFKKVVFQEFTDGSFTQPLYRGELNEHLGLLGPYIRAEVEDNIMVTFRNQASRPYSFYSSLISYEEDQRQGAEPRKNFVKPNETKTYFWKVQHHMAPTKDEFDCKAWAYFSDVDLEKDVHSGLIGPLLVCHTNTLNPAHGRQVTVQEFALFFTIFDETKSWYFTENMERNCRGAPSPAGSPTSTEEGTSESATPESGPGTSTEPSEGSAPGSPAGSPTSTEEGTSTEPSEGSAPGTSTEPSEGSAPGTSESATPESGPGSEPATSGSETPGSEPATSGSETPGSPAGSPTSTEEGTSESATPESGPGTSTEPSEGSAPGASSAPCNIQMEDPTFKENYRFHAINGYIMDTLPGLVMAQDQRIRWYLLSMGSNENIHSIHFSGHVFTVRKKEEYKMALYNLYPGVFETVEMLPSKAGIWRVECLIGEHLHAGMSTLFLVYSNKCQTPLGMASGHIRDFQITASGQYGQWAPKLARLHYSGSINAWSTKEPFSWIKVDLLAPMIIHGIKTQGARQKFSSLYISQFIIMYSLDGKKWQTYRGNSTGTLMVFFGNVDSSGIKHNIFNPPIIARYIRLHPTHYSIRSTLRMELMGCDLNSCSMPLGMESKAISDAQITASSYFTNMFATWSPSKARLHLQGRSNAWRPQVNNPKEWLQVDFQKTMKVTGVTTQGVKSLLTSMYVKEFLISSSQDGHQWTLFFQNGKVKVFQGNQDSFTPVVNSLDPPLLTRYLRIHPQSWVHQIALRMEVLGCEAQDLYGAPGTSESATPESGPGSEPATSGSETPGTSESATPESGPGSEPATSGSETPGTSESATPESGPGTSTEPSEGSAPGSPAGSPTSTEEGTSESATPESGPGSEPATSGSETPGTSESATPESGPGSPAGSPTSTEEGSPAGSPTSTEEGTSTEPSEGSAPGTSESATPESGPGTSESATPESGPGTSESATPESGPGSEPATSGSETPGSEPATSGSETPGSPAGSPTSTEEGTSTEPSEGSAPGTSTEPSEGSAPGSEPATSGSETPGTSESATPESGPGTSTEPSEGSAPASSEQKLISEEDLSPATGHHHHHH

SEQ ID NO: 1306 - DNA, 6612 bp, synthetic construct
  misc_feature 1..6612: note = Description of Artificial Sequence: Synthetic polynucleotide
  source 1..6612: mol_type = other DNA
gccaccagaagatactacctgggtgcagtggaactgtcatgggactatatgcaaagtgatctcggtgagctgcctgtggacgcaagatttcctcctagagtgccaaaatcttttccattcaacacctcagtcgtgtacaaaaagactctgtttgtagaattcacggatcaccttttcaacatcgctaagccaaggccaccctggatgggtctgctaggtcctaccatccaggctgaggtttatgatacagtggtcattacacttaagaacatggcttcccatcctgtcagtcttcatgctgttggtgtatcctactggaaagcttctgagggagctgaatatgatgatcagaccagtcaaagggagaaagaagatgataaagtcttccctggtggaagccatacatatgtctggcaggtcctgaaagagaatggtccaatggcctctgacccactgtgccttacctactcatatctttctcatgtggacctggtaaaagacttgaattcaggcctcattggagccctactagtatgtagagaagggagtctggccaaggaaaagacacagaccttgcacaaatttatactactttttgctgtatttgatgaagggaaaagttggcactcagaaacaaagaactccttgatgcaggatagggatgctgcatctgctcgggcctggcctaaaatgcacacagtcaatggttatgtaaacaggtctctgccaggtctgattggatgccacaggaaatcagtctattggcatgtgattggaatgggcaccactcctgaagtgcactcaatattcctcgaaggtcacacatttcttgtgaggaaccatcgccaggctagcttggaaatctcgccaataactttccttactgctcaaacactcttgatggaccttggacagtttctactgttttgtcatatctcttcccaccaacatgatggcatggaagcttatgtcaaagtagacagctgtccagaggaaccccaactacgaatgaaaaataatgaagaagcggaagactatgatgatgatcttactgattctgaaatggatgtggtcaggtttgatgatgacaactctccttcctttatccaaattcgctcagttgccaagaagcatcctaaaacttgggtacattacattgctgctgaagaggaggactgggactatgctcccttagtcctcgcccccgatgacagaagttataaaagtggcgcgccaaccagtacggagccgtccgaggggagcgcaccaggaagcccggctgggagcccgacttctaccgaagagggtacatctaccgaaccaagtgaaggttcagcaccaggcacctcaacagaaccctctgagggctcggcgcctggtacaagtgagtccgccaccccagaatccgggcctgggacaagcacagaaccttcggaagggagtgcccctggaacatccgaatcggcaaccccagaatcagggccaggatctgagcccgcgacttcgggctccgagacgcctgggacatccaccgagccctccgaaggatcagccccaggcaccagcacggagccctctgagggaagcgcacctggtaccagcgaaagcgcaactcccgaatcaggtcccggtacgagcgagtcggcgaccccggagagcgggccaggtgcctcgagccaatatttgaacaatggccctcagcggattggtaggaagtacaaaaaagtccgatttatggcatacacagatgaaacctttaagactcgtgaagctattcagcatgaatcaggaatcttgggacctttactttatggggaagttggagacacactgttgattatatttaagaatcaagcaagcagaccatataacatctaccctcacggaatcactgatgtccgtcctttgtattcaaggagattaccaaaaggtgtaaaacatttgaaggattttccaattctgccaggagaaatattcaaatataaatggacagtgactgtagaagatgggccaactaaatcagatcctcggtgcctgacccgctattactctagtttcgttaatatggagagagatctagcttcaggactcattggccctctcctcatctgctacaaagaatctgtagatcaaagaggaaaccagataatgtcagacaagaggaatgtcatcctgttttctgtatttgatgagaaccgaagctggtacctcacagagaatatacaacgctttctccccaatccagctggagtgcagcttgaggatccagagttccaagcctccaacatcatgcacagcatcaatggctatgtttttgatagtttgcagttgtcagtttgtttgcatgaggtggcatactggtacattctaagcattggagcacagactgacttcctttctgtcttcttctctggatataccttcaaacacaaaatggtctatgaagacacactcaccctattcccattctcaggagaaactgtcttcatgtcgatggaaaacccaggtctatggattctggggtgccacaactcagactttcggaacagaggcatgaccgccttactgaaggtttctagttgtgacaagaacactggtgattattacgaggacagttatgaagatatttcagcatacttgctgagtaaaaacaatgccattgaaccaagaagcttctctcaaaacggcgcgccaagtcccgctggaagcccaactagcaccgaagaggggacctcagagtccgccacccccgagtccggccctggctctgagcctgccactagcggctccgagactcctggcacatccgaaagcgctacacccgagagtggacccggcacctctaccgagcccagtgagggctccgcccctggaacaagcaccgagcccagcgaaggcagcgccccagggacctccacagagcccagtgaaggcagtgctcctggcaccagcaccgaaccaagcgagggctctgcacccgggacctccaccgagccaagcgaaggctctgcccctggcacttccaccgagcccagcgaaggcagcgcccctgggagccccgctggctctcccaccagcactgaggagggcacatctaccgaaccaagtgaaggctctgcaccaggtgcctcgagcccaccagtcttgaaacgccatcaagctgaaataactcgtactactcttcagtcagatcaagaggaaatcgattatgatgataccatatcagttgaaatgaagaaggaagattttgacatttatgatgaggatgaaaatcagagcccccgcagctttcaaaagaaaacacgacactattttattgctgcagtggagaggctctgggattatgggatgagtagctccccacatgttctaagaaacagggctcagagtggcagtgtccctcagttcaagaaagttgttttccaggaatttactgatggctcctttactcagcccttataccgtggagaactaaatgaacatttgggactcctggggccatatataagagcagaagttgaagataatatcatggtaactttcagaaatcaggcctctcgtccctattccttctattctagccttatttcttatgaggaagatcagaggcaaggagcagaacctagaaaaaactttgtcaagcctaatgaaaccaaaacttacttttggaaagtgcaacatcatatggcacccactaaagatgagtttgactgcaaagcctgggcttatttctctgatgttgacctggaaaaagatgtgcactcaggcctgattggaccccttctggtctgccacactaacacactgaaccctgctcatgggagacaagtgacagtacaggaatttgctctgtttttcaccatctttgatgagaccaaaagctggtacttcactgaaaatatggaaagaaactgcaggggcgcgccatctccagccgggtccccaacttcgaccgaggaagggacctccgagtcagctaccccggagtccggtcctggcacctccaccgaaccatcggagggcagcgcccctgggagccctgccgggagccctacaagcaccgaagagggcaccagtacagagccaagtgaggggagcgcccctggtactagtactgaaccatccgaggggtcagctccaggcacgagtgagtccgctacccccgagagcggaccgggctcagagcccgccacgagtggcagtgaaactccaggctcagaacccgccactagtgggtcagagactccaggcagccctgccggatcccctacgtccaccgaggagggaacatctgagtccgcaacacccgaatccggtccaggcacctccacggaacctagtgaaggctcggcaccaggtgcctcgagcgctccctgcaatatccagatggaagatcccacttttaaagagaattatcgcttccatgcaatcaatggctacataatggatacactacctggcttagtaatggctcaggatcaaaggattcgatggtatctgctcagcatgggcagcaatgaaaacatccattctattcatttcagtggacatgtgttcactgtacgaaaaaaagaggagtataaaatggcactgtacaatctctatccaggtgtttttgagacagtggaaatgttaccatccaaagctggaatttggcgggtggaatgccttattggcgagcatctacatgctgggatgagcacactttttctggtgtacagcaataagtgtcagactcccctgggaatggcttctggacacattagagattttcagattacagcttcaggacaatatggacagtgggccccaaagctggccagacttcattattccggatcaatcaatgcctggagcaccaaggagcccttttcttggatcaaggtggatctgttggcaccaatgattattcacggcatcaagacccagggtgcccgtcagaagttctccagcctctacatctctcagtttatcatcatgtatagtcttgatgggaagaagtggcagacttatcgaggaaattccactggaaccttaatggtcttctttggcaatgtggattcatctgggataaaacacaatatttttaaccctccaattattgctcgatacatccgtttgcacccaactcattatagcattcgcagcactcttcgcatggagttgatgggctgtgatttaaatagttgcagcatgccattgggaatggagagtaaagcaatatcagatgcacagattactgcttcatcctactttaccaatatgtttgccacctggtctccttcaaaagctcgacttcacctccaagggaggagtaatgcctggagacctcaggtgaataatccaaaagagtggctgcaagtggacttccagaagacaatgaaagtcacaggagtaactactcagggagtaaaatctctgcttaccagcatgtatgtgaaggagttcctcatctccagcagtcaagatggccatcagtggactctcttttttcagaatggcaaagtaaaggtttttcagggaaatcaagactccttcacacctgtggtgaactctctagacccaccgttactgactcgctaccttcgaattcacccccagagttgggtgcaccagattgccctgaggatggaggttctgggctgcgaggcacaggacctctacggcgcgccaggtacctcagagtctgctacccccgagtcagggccaggatcagagccagccacctccgggtctgagacacccgggacttccgagagtgccacccctgagtccggacccgggtccgagcccgccacttccggctccgaaactcccggcacaagcgagagcgctaccccagagtcaggaccaggaacatctacagagccctctgaaggctccgctccagggtccccagccggcagtcccactagcaccgaggagggaacctctgaaagcgccacacccgaatcagggccagggtctgagcctgctaccagcggcagcgagacaccaggcacctctgagtccgccacaccagagtccggacccggatctcccgctgggagccccacctccactgaggagggatctcctgctggctctccaacatctactgaggaaggtacctcaaccgagccatccgagggatcagctcccggcacctcagagtcggcaaccccggagtctggacccggaacttccgaaagtgccacaccagagtccggtcccgggacttcagaatcagcaacacccgagtccggccctgggtctgaacccgccacaagtggtagtgagacaccaggatcagaacctgctacctcagggtcagagacacccggatctccggcaggctcaccaacctccactgaggagggcaccagcacagaaccaagcgagggctccgcacccggaacaagcactgaacccagtgagggttcagcacccggctctgagccggccacaagtggcagtgagacacccggcacttcagagagtgccacccccgagagtggcccaggcactagtaccgagccctctgaaggcagtgcgccagcctcgagcgaacaaaaactcatctcagaagaggatctgtcacctgcaaccggtcatcatcaccatcaccattga

SEQ ID NO: 1307 - protein, 2203 aa, synthetic construct
  REGION 1..2203: note = Description of Artificial Sequence: Synthetic polypeptide
ATRRYYLGAVELSWDYMQSDLGELPVDARFPPRVPKSFPFNTSVVYKKTLFVEFTDHLFNIAKPRPPWMGLLGPTIQAEVYDTVVITLKNMASHPVSLHAVGVSYWKASEGAEYDDQTSQREKEDDKVFPGGSHTYVWQVLKENGPMASDPLCLTYSYLSHVDLVKDLNSGLIGALLVCREGSLAKEKTQTLHKFILLFAVFDEGKSWHSETKNSLMQDRDAASARAWPKMHTVNGYVNRSLPGLIGCHRKSVYWHVIGMGTTPEVHSIFLEGHTFLVRNHRQASLEISPITFLTAQTLLMDLGQFLLFCHISSHQHDGMEAYVKVDSCPEEPQLRMKNNEEAEDYDDDLTDSEMDVVRFDDDNSPSFIQIRSVAKKHPKTWVHYIAAEEEDWDYAPLVLAPDGAPGASPGTSSTGSPGSSPSASTGTGPGSSPSASTGTGPGTPGSGTASSSPGSSTPSGATGSPGSSPSASTGTGPGASPGTSSTGSPGTPGSGTASSSPGSSTPSGATGSPGTPGSGTASSSPGASPGTSSTGSPGASPGTSSTGSPASSDRSYKSQYLNNGPQRIGRKYKKVRFMAYTDETFKTREAIQHESGILGPLLYGEVGDTLLIIFKNQASRPYNIYPHGITDVRPLYSRRLPKGVKHLKDFPILPGEIFKYKWTVTVEDGPTKSDPRCLTRYYSSFVNMERDLASGLIGPLLICYKESVDQRGNQIMSDKRNVILFSVFDENRSWYLTENIQRFLPNPAGVQLEDPEFQASNIMHSINGYVFDSLQLSVCLHEVAYWYILSIGAQTDFLSVFFSGYTFKHKMVYEDTLTLFPFSGETVFMSMENPGLWILGCHNSDFRNRGMTALLKVSSCDKNTGDYYEDSYEDISAYLLSKNNAIEPRSFSQNGAPSPAGSPTSTEEGTSESATPESGPGSEPATSGSETPGTSESATPESGPGTSTEPSEGSAPGTSTEPSEGSAPGTSTEPSEGSAPGTSTEPSEGSAPGTSTEPSEGSAPGTSTEPSEGSAPGSPAGSPTSTEEGTSTEPSEGSAPGASSPPVLKRHQAEITRTTLQSDQEEIDYDDTISVEMKKEDFDIYDEDENQSPRSFQKKTRHYFIAAVERLWDYGMSSSPHVLRNRAQSGSVPQFKKVVFQEFTDGSFTQPLYRGELNEHLGLLGPYIRAEVEDNIMVTFRNQASRPYSFYSSLISYEEDQRQGAEPRKNFVKPNETKTYFWKVQHHMAPTKDEFDCKAWAYFSDVDLEKDVHSGLIGPLLVCHTNTLNPAHGRQVTVQEFALFFTIFDETKSWYFTENMERNCRGAPGTPGSGTASSSPGASPGTSSTGSPGASPGTSSTGSPGASPGTSSTGSPGSSPSASTGTGPGTPGSGTASSSPGASPGTSSTGSPGASPGTSSTGSPGASPGTSSTGSPGSSTPSGATGSPGSSTPSGATGSPGASPGTSSTGSPASSAPCNIQMEDPTFKENYRFHAINGYIMDTLPGLVMAQDQRIRWYLLSMGSNENIHSIHFSGHVFTVRKKEEYKMALYNLYPGVFETVEMLPSKAGIWRVECLIGEHLHAGMSTLFLVYSNKCQTPLGMASGHIRDFQITASGQYGQWAPKLARLHYSGSINAWSTKEPFSWIKVDLLAPMIIHGIKTQGARQKFSSLYISQFIIMYSLDGKKWQTYRGNSTGTLMVFFGNVDSSGIKHNIFNPPIIARYIRLHPTHYSIRSTLRMELMGCDLNSCSMPLGMESKAISDAQITASSYFTNMFATWSPSKARLHLQGRSNAWRPQVNNPKEWLQVDFQKTMKVTGVTTQGVKSLLTSMYVKEFLISSSQDGHQWTLFFQNGKVKVFQGNQDSFTPVVNSLDPPLLTRYLRIHPQSWVHQIALRMEVLGCEAQDLYGAPGTSESATPESGPGSEPATSGSETPGTSESATPESGPGSEPATSGSETPGTSESATPESGPGTSTEPSEGSAPGSPAGSPTSTEEGTSESATPESGPGSEPATSGSETPGTSESATPESGPGSPAGSPTSTEEGSPAGSPTSTEEGTSTEPSEGSAPGTSESATPESGPGTSESATPESGPGTSESATPESGPGSEPATSGSETPGSEPATSGSETPGSPAGSPTSTEEGTSTEPSEGSAPGTSTEPSEGSAPGSEPATSGSETPGTSESATPESGPGTSTEPSEGSAPASSEQKLISEEDLSPATGHHHHHH

SEQ ID NO: 1308 - DNA, 6612 bp, synthetic construct
  misc_feature 1..6612: note = Description of Artificial Sequence: Synthetic polynucleotide
  source 1..6612: mol_type = other DNA
gccaccagaagatactacctgggtgcagtggaactgtcatgggactatatgcaaagtgatctcggtgagctgcctgtggacgcaagatttcctcctagagtgccaaaatcttttccattcaacacctcagtcgtgtacaaaaagactctgtttgtagaattcacggatcaccttttcaacatcgctaagccaaggccaccctggatgggtctgctaggtcctaccatccaggctgaggtttatgatacagtggtcattacacttaagaacatggcttcccatcctgtcagtcttcatgctgttggtgtatcctactggaaagcttctgagggagctgaatatgatgatcagaccagtcaaagggagaaagaagatgataaagtcttccctggtggaagccatacatatgtctggcaggtcctgaaagagaatggtccaatggcctctgacccactgtgccttacctactcatatctttctcatgtggacctggtaaaagacttgaattcaggcctcattggagccctactagtatgtagagaagggagtctggccaaggaaaagacacagaccttgcacaaatttatactactttttgctgtatttgatgaagggaaaagttggcactcagaaacaaagaactccttgatgcaggatagggatgctgcatctgctcgggcctggcctaaaatgcacacagtcaatggttatgtaaacaggtctctgccaggtctgattggatgccacaggaaatcagtctattggcatgtgattggaatgggcaccactcctgaagtgcactcaatattcctcgaaggtcacacatttcttgtgaggaaccatcgccaggctagcttggaaatctcgccaataactttccttactgctcaaacactcttgatggaccttggacagtttctactgttttgtcatatctcttcccaccaacatgatggcatggaagcttatgtcaaagtagacagctgtccagaggaaccccaactacgaatgaaaaataatgaagaagcggaagactatgatgatgatcttactgattctgaaatggatgtggtcaggtttgatgatgacaactctccttcctttatccaaattcgctcagttgccaagaagcatcctaaaacttgggtacattacattgctgctgaagaggaggactgggactatgctcccttagtcctcgcccccgatggcgcgccaggtgcctcgccgggaacatcatcaactggttcacccgggtcatccccctcggcctcaaccgggacgggtcccggctcatcccccagcgccagcactggaacaggtcctggcactcctggttccggtacggcatcgtcatccccgggaagctcaacaccgtccggagcgacaggatcacctggctcgtcaccttcggcgtcaactggaacggggccaggggcctcacccggaacgtcctcgactgggtcgcctggtacgccgggatcaggaacggcctcatcctcgcctgggtcctcaacgccctcgggtgcgactggttcgccgggaactcctggctcggggacggcctcgtcgtcgcctggggcatcaccggggacgagctccacggggtcccctggagcgtcaccggggacctcctcgacaggtagcccggcctcgagcgacagaagttataaaagtcaatatttgaacaatggccctcagcggattggtaggaagtacaaaaaagtccgatttatggcatacacagatgaaacctttaagactcgtgaagctattcagcatgaatcaggaatcttgggacctttactttatggggaagttggagacacactgttgattatatttaagaatcaagcaagcagaccatataacatctaccctcacggaatcactgatgtccgtcctttgtattcaaggagattaccaaaaggtgtaaaacatttgaaggattttccaattctgccaggagaaatattcaaatataaatggacagtgactgtagaagatgggccaactaaatcagatcctcggtgcctgacccgctattactctagtttcgttaatatggagagagatctagcttcaggactcattggccctctcctcatctgctacaaagaatctgtagatcaaagaggaaaccagataatgtcagacaagaggaatgtcatcctgttttctgtatttgatgagaaccgaagctggtacctcacagagaatatacaacgctttctccccaatccagctggagtgcagcttgaggatccagagttccaagcctccaacatcatgcacagcatcaatggctatgtttttgatagtttgcagttgtcagtttgtttgcatgaggtggcatactggtacattctaagcattggagcacagactgacttcctttctgtcttcttctctggatataccttcaaacacaaaatggtctatgaagacacactcaccctattcccattctcaggagaaactgtcttcatgtcgatggaaaacccaggtctatggattctggggtgccacaactcagactttcggaacagaggcatgaccgccttactgaaggtttctagttgtgacaagaacactggtgattattacgaggacagttatgaagatatttcagcatacttgctgagtaaaaacaatgccattgaaccaagaagcttctctcaaaacggcgcgccaagtcccgctggaagcccaactagcaccgaagaggggacctcagagtccgccacccccgagtccggccctggctctgagcctgccactagcggctccgagactcctggcacatccgaaagcgctacacccgagagtggacccggcacctctaccgagcccagtgagggctccgcccctggaacaagcaccgagcccagcgaaggcagcgccccagggacctccacagagcccagtgaaggcagtgctcctggcaccagcaccgaaccaagcgagggctctgcacccgggacctccaccgagccaagcgaaggctctgcccctggcacttccaccgagcccagcgaaggcagcgcccctgggagccccgctggctctcccaccagcactgaggagggcacatctaccgaaccaagtgaaggctctgcaccaggtgcctcgagcccaccagtcttgaaacgccatcaagctgaaataactcgtactactcttcagtcagatcaagaggaaatcgattatgatgataccatatcagttgaaatgaagaaggaagattttgacatttatgatgaggatgaaaatcagagcccccgcagctttcaaaagaaaacacgacactattttattgctgcagtggagaggctctgggattatgggatgagtagctccccacatgttctaagaaacagggctcagagtggcagtgtccctcagttcaagaaagttgttttccaggaatttactgatggctcctttactcagcccttataccgtggagaactaaatgaacatttgggactcctggggccatatataagagcagaagttgaagataatatcatggtaactttcagaaatcaggcctctcgtccctattccttctattctagccttatttcttatgaggaagatcagaggcaaggagcagaacctagaaaaaactttgtcaagcctaatgaaaccaaaacttacttttggaaagtgcaacatcatatggcacccactaaagatgagtttgactgcaaagcctgggcttatttctctgatgttgacctggaaaaagatgtgcactcaggcctgattggaccccttctggtctgccacactaacacactgaaccctgctcatgggagacaagtgacagtacaggaatttgctctgtttttcaccatctttgatgagaccaaaagctggtacttcactgaaaatatggaaagaaactgcaggggcgcgccaggtacacccggatcgggtacagcgtcatcgagccccggtgcgtcacctggtacgtcgagcacggggtcgccaggggcgtcccctgggacgtcctcaacaggctcgcccggtgcgtcacccggcacgtcgtccacgggttcacctggtagctccccttccgcgtccactggcaccgggcctggaactccggggagcggcacagcgagctcgtcgccgggagcatcgcctgggacatcgagcaccgggtcgccaggagcatcgcccggaacatccagcacaggaagccccggcgcgtcgcccgggacatcaagcacaggttccccgggatcgagcacgccgtccggagccactggatcaccagggagctcgacaccttccggcgcaacgggatcgcccggagccagcccgggtacgtcaagcactggctcccctgcctcgagcgctccctgcaatatccagatggaagatcccacttttaaagagaattatcgcttccatgcaatcaatggctacataatggatacactacctggcttagtaatggctcaggatcaaaggattcgatggtatctgctcagcatgggcagcaatgaaaacatccattctattcatttcagtggacatgtgttcactgtacgaaaaaaagaggagtataaaatggcactgtacaatctctatccaggtgtttttgagacagtggaaatgttaccatccaaagctggaatttggcgggtggaatgccttattggcgagcatctacatgctgggatgagcacactttttctggtgtacagcaataagtgtcagactcccctgggaatggcttctggacacattagagattttcagattacagcttcaggacaatatggacagtgggccccaaagctggccagacttcattattccggatcaatcaatgcctggagcaccaaggagcccttttcttggatcaaggtggatctgttggcaccaatgattattcacggcatcaagacccagggtgcccgtcagaagttctccagcctctacatctctcagtttatcatcatgtatagtcttgatgggaagaagtggcagacttatcgaggaaattccactggaaccttaatggtcttctttggcaatgtggattcatctgggataaaacacaatatttttaaccctccaattattgctcgatacatccgtttgcacccaactcattatagcattcgcagcactcttcgcatggagttgatgggctgtgatttaaatagttgcagcatgccattgggaatggagagtaaagcaatatcagatgcacagattactgcttcatcctactttaccaatatgtttgccacctggtctccttcaaaagctcgacttcacctccaagggaggagtaatgcctggagacctcaggtgaataatccaaaagagtggctgcaagtggacttccagaagacaatgaaagtcacaggagtaactactcagggagtaaaatctctgcttaccagcatgtatgtgaaggagttcctcatctccagcagtcaagatggccatcagtggactctcttttttcagaatggcaaagtaaaggtttttcagggaaatcaagactccttcacacctgtggtgaactctctagacccaccgttactgactcgctaccttcgaattcacccccagagttgggtgcaccagattgccctgaggatggaggttctgggctgcgaggcacaggacctctacggcgcgccaggtacctcagagtctgctacccccgagtcagggccaggatcagagccagccacctccgggtctgagacacccgggacttccgagagtgccacccctgagtccggacccgggtccgagcccgccacttccggctccgaaactcccggcacaagcgagagcgctaccccagagtcaggaccaggaacatctacagagccctctgaaggctccgctccagggtccccagccggcagtcccactagcaccgaggagggaacctctgaaagcgccacacccgaatcagggccagggtctgagcctgctaccagcggcagcgagacaccaggcacctctgagtccgccacaccagagtccggacccggatctcccgctgggagccccacctccactgaggagggatctcctgctggctctccaacatctactgaggaaggtacctcaaccgagccatccgagggatcagctcccggcacctcagagtcggcaaccccggagtctggacccggaacttccgaaagtgccacaccagagtccggtcccgggacttcagaatcagcaacacccgagtccggccctgggtctgaacccgccacaagtggtagtgagacaccaggatcagaacctgctacctcagggtcagagacacccggatctccggcaggctcaccaacctccactgaggagggcaccagcacagaaccaagcgagggctccgcacccggaacaagcactgaacccagtgagggttcagcacccggctctgagccggccacaagtggcagtgagacacccggcacttcagagagtgccacccccgagagtggcccaggcactagtaccgagccctctgaaggcagtgcgccagcctcgagcgaacaaaaactcatctcagaagaggatctgtcacctgcaaccggtcatcatcaccatcaccattga

SEQ ID NO: 1309 - protein, 2203 aa, synthetic construct
  REGION 1..2203: note = Description of Artificial Sequence: Synthetic polypeptide
ATRRYYLGAVELSWDYMQSDLGELPVDARFPPRVPKSFPFNTSVVYKKTLFVEFTDHLFNIAKPRPPWMGLLGPTIQAEVYDTVVITLKNMASHPVSLHAVGVSYWKASEGAEYDDQTSQREKEDDKVFPGGSHTYVWQVLKENGPMASDPLCLTYSYLSHVDLVKDLNSGLIGALLVCREGSLAKEKTQTLHKFILLFAVFDEGKSWHSETKNSLMQDRDAASARAWPKMHTVNGYVNRSLPGLIGCHRKSVYWHVIGMGTTPEVHSIFLEGHTFLVRNHRQASLEISPITFLTAQTLLMDLGQFLLFCHISSHQHDGMEAYVKVDSCPEEPQLRMKNNEEAEDYDDDLTDSEMDVVRFDDDNSPSFIQIRSVAKKHPKTWVHYIAAEEEDWDYAPLVLAPDGAPTSTEPSEGSAPGSPAGSPTSTEEGTSTEPSEGSAPGTSTEPSEGSAPGTSESATPESGPGTSTEPSEGSAPGTSESATPESGPGSEPATSGSETPGTSTEPSEGSAPGTSTEPSEGSAPGTSESATPESGPGTSESATPESGPGASSDRSYKSQYLNNGPQRIGRKYKKVRFMAYTDETFKTREAIQHESGILGPLLYGEVGDTLLIIFKNQASRPYNIYPHGITDVRPLYSRRLPKGVKHLKDFPILPGEIFKYKWTVTVEDGPTKSDPRCLTRYYSSFVNMERDLASGLIGPLLICYKESVDQRGNQIMSDKRNVILFSVFDENRSWYLTENIQRFLPNPAGVQLEDPEFQASNIMHSINGYVFDSLQLSVCLHEVAYWYILSIGAQTDFLSVFFSGYTFKHKMVYEDTLTLFPFSGETVFMSMENPGLWILGCHNSDFRNRGMTALLKVSSCDKNTGDYYEDSYEDISAYLLSKNNAIEPRSFSQNGAPSPAGSPTSTEEGTSESATPESGPGSEPATSGSETPGTSESATPESGPGTSTEPSEGSAPGTSTEPSEGSAPGTSTEPSEGSAPGTSTEPSEGSAPGTSTEPSEGSAPGTSTEPSEGSAPGSPAGSPTSTEEGTSTEPSEGSAPGASSPPVLKRHQAEITRTTLQSDQEEIDYDDTISVEMKKEDFDIYDEDENQSPRSFQKKTRHYFIAAVERLWDYGMSSSPHVLRNRAQSGSVPQFKKVVFQEFTDGSFTQPLYRGELNEHLGLLGPYIRAEVEDNIMVTFRNQASRPYSFYSSLISYEEDQRQGAEPRKNFVKPNETKTYFWKVQHHMAPTKDEFDCKAWAYFSDVDLEKDVHSGLIGPLLVCHTNTLNPAHGRQVTVQEFALFFTIFDETKSWYFTENMERNCRGAPGTPGSGTASSSPGASPGTSSTGSPGASPGTSSTGSPGASPGTSSTGSPGSSPSASTGTGPGTPGSGTASSSPGASPGTSSTGSPGASPGTSSTGSPGASPGTSSTGSPGSSTPSGATGSPGSSTPSGATGSPGASPGTSSTGSPASSAPCNIQMEDPTFKENYRFHAINGYIMDTLPGLVMAQDQRIRWYLLSMGSNENIHSIHFSGHVFTVRKKEEYKMALYNLYPGVFETVEMLPSKAGIWRVECLIGEHLHAGMSTLFLVYSNKCQTPLGMASGHIRDFQITASGQYGQWAPKLARLHYSGSINAWSTKEPFSWIKVDLLAPMIIHGIKTQGARQKFSSLYISQFIIMYSLDGKKWQTYRGNSTGTLMVFFGNVDSSGIKHNIFNPPIIARYIRLHPTHYSIRSTLRMELMGCDLNSCSMPLGMESKAISDAQITASSYFTNMFATWSPSKARLHLQGRSNAWRPQVNNPKEWLQVDFQKTMKVTGVTTQGVKSLLTSMYVKEFLISSSQDGHQWTLFFQNGKVKVFQGNQDSFTPVVNSLDPPLLTRYLRIHPQSWVHQIALRMEVLGCEAQDLYGAPGTSESATPESGPGSEPATSGSETPGTSESATPESGPGSEPATSGSETPGTSESATPESGPGTSTEPSEGSAPGSPAGSPTSTEEGTSESATPESGPGSEPATSGSETPGTSESATPESGPGSPAGSPTSTEEGSPAGSPTSTEEGTSTEPSEGSAPGTSESATPESGPGTSESATPESGPGTSESATPESGPGSEPATSGSETPGSEPATSGSETPGSPAGSPTSTEEGTSTEPSEGSAPGTSTEPSEGSAPGSEPATSGSETPGTSESATPESGPGTSTEPSEGSAPASSEQKLISEEDLSPATGHHHHHH

SEQ ID NO: 1310 - DNA, 6612 bp, synthetic construct
  misc_feature 1..6612: note = Description of Artificial Sequence: Synthetic polynucleotide
  source 1..6612: mol_type = other DNA
gccaccagaagatactacctgggtgcagtggaactgtcatgggactatatgcaaagtgatctcggtgagctgcctgtggacgcaagatttcctcctagagtgccaaaatcttttccattcaacacctcagtcgtgtacaaaaagactctgtttgtagaattcacggatcaccttttcaacatcgctaagccaaggccaccctggatgggtctgctaggtcctaccatccaggctgaggtttatgatacagtggtcattacacttaagaacatggcttcccatcctgtcagtcttcatgctgttggtgtatcctactggaaagcttctgagggagctgaatatgatgatcagaccagtcaaagggagaaagaagatgataaagtcttccctggtggaagccatacatatgtctggcaggtcctgaaagagaatggtccaatggcctctgacccactgtgccttacctactcatatctttctcatgtggacctggtaaaagacttgaattcaggcctcattggagccctactagtatgtagagaagggagtctggccaaggaaaagacacagaccttgcacaaatttatactactttttgctgtatttgatgaagggaaaagttggcactcagaaacaaagaactccttgatgcaggatagggatgctgcatctgctcgggcctggcctaaaatgcacacagtcaatggttatgtaaacaggtctctgccaggtctgattggatgccacaggaaatcagtctattggcatgtgattggaatgggcaccactcctgaagtgcactcaatattcctcgaaggtcacacatttcttgtgaggaaccatcgccaggctagcttggaaatctcgccaataactttccttactgctcaaacactcttgatggaccttggacagtttctactgttttgtcatatctcttcccaccaacatgatggcatggaagcttatgtcaaagtagacagctgtccagaggaaccccaactacgaatgaaaaataatgaagaagcggaagactatgatgatgatcttactgattctgaaatggatgtggtcaggtttgatgatgacaactctccttcctttatccaaattcgctcagttgccaagaagcatcctaaaacttgggtacattacattgctgctgaagaggaggactgggactatgctcccttagtcctcgcccccgatggcgcgccaaccagtacggagccgtccgaggggagcgcaccaggaagcccggctgggagcccgacttctaccgaagagggtacatctaccgaaccaagtgaaggttcagcaccaggcacctcaacagaaccctctgagggctcggcgcctggtacaagtgagtccgccaccccagaatccgggcctgggacaagcacagaaccttcggaagggagtgcccctggaacatccgaatcggcaaccccagaatcagggccaggatctgagcccgcgacttcgggctccgagacgcctgggacatccaccgagccctccgaaggatcagccccaggcaccagcacggagccctctgagggaagcgcacctggtaccagcgaaagcgcaactcccgaatcaggtcccggtacgagcgagtcggcgaccccggagagcgggccaggtgcctcgagcgacagaagttataaaagtcaatatttgaacaatggccctcagcggattggtaggaagtacaaaaaagtccgatttatggcatacacagatgaaacctttaagactcgtgaagctattcagcatgaatcaggaatcttgggacctttactttatggggaagttggagacacactgttgattatatttaagaatcaagcaagcagaccatataacatctaccctcacggaatcactgatgtccgtcctttgtattcaaggagattaccaaaaggtgtaaaacatttgaaggattttccaattctgccaggagaaatattcaaatataaatggacagtgactgtagaagatgggccaactaaatcagatcctcggtgcctgacccgctattactctagtttcgttaatatggagagagatctagcttcaggactcattggccctctcctcatctgctacaaagaatctgtagatcaaagaggaaaccagataatgtcagacaagaggaatgtcatcctgttttctgtatttgatgagaaccgaagctggtacctcacagagaatatacaacgctttctccccaatccagctggagtgcagcttgaggatccagagttccaagcctccaacatcatgcacagcatcaatggctatgtttttgatagtttgcagttgtcagtttgtttgcatgaggtggcatactggtacattctaagcattggagcacagactgacttcctttctgtcttcttctctggatataccttcaaacacaaaatggtctatgaagacacactcaccctattcccattctcaggagaaactgtcttcatgtcgatggaaaacccaggtctatggattctggggtgccacaactcagactttcggaacagaggcatgaccgccttactgaaggtttctagttgtgacaagaacactggtgattattacgaggacagttatgaagatatttcagcatacttgctgagtaaaaacaatgccattgaaccaagaagcttctctcaaaacggcgcgccaagtcccgctggaagcccaactagcaccgaagaggggacctcagagtccgccacccccgagtccggccctggctctgagcctgccactagcggctccgagactcctggcacatccgaaagcgctacacccgagagtggacccggcacctctaccgagcccagtgagggctccgcccctggaacaagcaccgagcccagcgaaggcagcgccccagggacctccacagagcccagtgaaggcagtgctcctggcaccagcaccgaaccaagcgagggctctgcacccgggacctccaccgagccaagcgaaggctctgcccctggcacttccaccgagcccagcgaaggcagcgcccctgggagccccgctggctctcccaccagcactgaggagggcacatctaccgaaccaagtgaaggctctgcaccaggtgcctcgagcccaccagtcttgaaacgccatcaagctgaaataactcgtactactcttcagtcagatcaagaggaaatcgattatgatgataccatatcagttgaaatgaagaaggaagattttgacatttatgatgaggatgaaaatcagagcccccgcagctttcaaaagaaaacacgacactattttattgctgcagtggagaggctctgggattatgggatgagtagctccccacatgttctaagaaacagggctcagagtggcagtgtccctcagttcaagaaagttgttttccaggaatttactgatggctcctttactcagcccttataccgtggagaactaaatgaacatttgggactcctggggccatatataagagcagaagttgaagataatatcatggtaactttcagaaatcaggcctctcgtccctattccttctattctagccttatttcttatgaggaagatcagaggcaaggagcagaacctagaaaaaactttgtcaagcctaatgaaaccaaaacttacttttggaaagtgcaacatcatatggcacccactaaagatgagtttgactgcaaagcctgggcttatttctctgatgttgacctggaaaaagatgtgcactcaggcctgattggaccccttctggtctgccacactaacacactgaaccctgctcatgggagacaagtgacagtacaggaatttgctctgtttttcaccatctttgatgagaccaaaagctggtacttcactgaaaatatggaaagaaactgcaggggcgcgccaggtacacccggatcgggtacagcgtcatcgagccccggtgcgtcacctggtacgtcgagcacggggtcgccaggggcgtcccctgggacgtcctcaacaggctcgcccggtgcgtcacccggcacgtcgtccacgggttcacctggtagctccccttccgcgtccactggcaccgggcctggaactccggggagcggcacagcgagctcgtcgccgggagcatcgcctgggacatcgagcaccgggtcgccaggagcatcgcccggaacatccagcacaggaagccccggcgcgtcgcccgggacatcaagcacaggttccccgggatcgagcacgccgtccggagccactggatcaccagggagctcgacaccttccggcgcaacgggatcgcccggagccagcccgggtacgtcaagcactggctcccctgcctcgagcgctccctgcaatatccagatggaagatcccacttttaaagagaattatcgcttccatgcaatcaatggctacataatggatacactacctggcttagtaatggctcaggatcaaaggattcgatggtatctgctcagcatgggcagcaatgaaaacatccattctattcatttcagtggacatgtgttcactgtacgaaaaaaagaggagtataaaatggcactgtacaatctctatccaggtgtttttgagacagtggaaatgttaccatccaaagctggaatttggcgggtggaatgccttattggcgagcatctacatgctgggatgagcacactttttctggtgtacagcaataagtgtcagactcccctgggaatggcttctggacacattagagattttcagattacagcttcaggacaatatggacagtgggccccaaagctggccagacttcattattccggatcaatcaatgcctggagcaccaaggagcccttttcttggatcaaggtggatctgttggcaccaatgattattcacggcatcaagacccagggtgcccgtcagaagttctccagcctctacatctctcagtttatcatcatgtatagtcttgatgggaagaagtggcagacttatcgaggaaattccactggaaccttaatggtcttctttggcaatgtggattcatctgggataaaacacaatatttttaaccctccaattattgctcgatacatccgtttgcacccaactcattatagcattcgcagcactcttcgcatggagttgatgggctgtgatttaaatagttgcagcatgccattgggaatggagagtaaagcaatatcagatgcacagattactgcttcatcctactttaccaatatgtttgccacctggtctccttcaaaagctcgacttcacctccaagggaggagtaatgcctggagacctcaggtgaataatccaaaagagtggctgcaagtggacttccagaagacaatgaaagtcacaggagtaactactcagggagtaaaatctctgcttaccagcatgtatgtgaaggagttcctcatctccagcagtcaagatggccatcagtggactctcttttttcagaatggcaaagtaaaggtttttcagggaaatcaagactccttcacacctgtggtgaactctctagacccaccgttactgactcgctaccttcgaattcacccccagagttgggtgcaccagattgccctgaggatggaggttctgggctgcgaggcacaggacctctacggcgcgccaggtacctcagagtctgctacccccgagtcagggccaggatcagagccagccacctccgggtctgagacacccgggacttccgagagtgccacccctgagtccggacccgggtccgagcccgccacttccggctccgaaactcccggcacaagcgagagcgctaccccagagtcaggaccaggaacatctacagagccctctgaaggctccgctccagggtccccagccggcagtcccactagcaccgaggagggaacctctgaaagcgccacacccgaatcagggccagggtctgagcctgctaccagcggcagcgagacaccaggcacctctgagtccgccacaccagagtccggacccggatctcccgctgggagccccacctccactgaggagggatctcctgctggctctccaacatctactgaggaaggtacctcaaccgagccatccgagggatcagctcccggcacctcagagtcggcaaccccggagtctggacccggaacttccgaaagtgccacaccagagtccggtcccgggacttcagaatcagcaacacccgagtccggccctgggtctgaacccgccacaagtggtagtgagacaccaggatcagaacctgctacctcagggtcagagacacccggatctccggcaggctcaccaacctccactgaggagggcaccagcacagaaccaagcgagggctccgcacccggaacaagcactgaacccagtgagggttcagcacccggctctgagccggccacaagtggcagtgagacacccggcacttcagagagtgccacccccgagagtggcccaggcactagtaccgagccctctgaaggcagtgcgccagcctcgagcgaacaaaaactcatctcagaagaggatctgtcacctgcaaccggtcatcatcaccatcaccattga

SEQ ID NO: 1311 - protein, 2203 aa, synthetic construct
  REGION 1..2203: note = Description of Artificial Sequence: Synthetic polypeptide
ATRRYYLGAVELSWDYMQSDLGELPVDARFPPRVPKSFPFNTSVVYKKTLFVEFTDHLFNIAKPRPPWMGLLGPTIQAEVYDTVVITLKNMASHPVSLHAVGVSYWKASEGAEYDDQTSQREKEDDKVFPGGSHTYVWQVLKENGPMASDPLCLTYSYLSHVDLVKDLNSGLIGALLVCREGSLAKEKTQTLHKFILLFAVFDEGKSWHSETKNSLMQDRDAASARAWPKMHTVNGYVNRSLPGLIGCHRKSVYWHVIGMGTTPEVHSIFLEGHTFLVRNHRQASLEISPITFLTAQTLLMDLGQFLLFCHISSHQHDGMEAYVKVDSCPEEPQLRMKNNEEAEDYDDDLTDSEMDVVRFDDDNSPSFIQIRSVAKKHPKTWVHYIAAEEEDWDYAPLVLAPDDRSYKSGAPTSTEPSEGSAPGSPAGSPTSTEEGTSTEPSEGSAPGTSTEPSEGSAPGTSESATPESGPGTSTEPSEGSAPGTSESATPESGPGSEPATSGSETPGTSTEPSEGSAPGTSTEPSEGSAPGTSESATPESGPGTSESATPESGPGASSQYLNNGPQRIGRKYKKVRFMAYTDETFKTREAIQHESGILGPLLYGEVGDTLLIIFKNQASRPYNIYPHGITDVRPLYSRRLPKGVKHLKDFPILPGEIFKYKWTVTVEDGPTKSDPRCLTRYYSSFVNMERDLASGLIGPLLICYKESVDQRGNQIMSDKRNVILFSVFDENRSWYLTENIQRFLPNPAGVQLEDPEFQASNIMHSINGYVFDSLQLSVCLHEVAYWYILSIGAQTDFLSVFFSGYTFKHKMVYEDTLTLFPFSGETVFMSMENPGLWILGCHNSDFRNRGMTALLKVSSCDKNTGDYYEDSYEDISAYLLSKNNAIEPRSFSQNGAPSPAGSPTSTEEGTSESATPESGPGSEPATSGSETPGTSESATPESGPGTSTEPSEGSAPGTSTEPSEGSAPGTSTEPSEGSAPGTSTEPSEGSAPGTSTEPSEGSAPGTSTEPSEGSAPGSPAGSPTSTEEGTSTEPSEGSAPGASSPPVLKRHQAEITRTTLQSDQEEIDYDDTISVEMKKEDFDIYDEDENQSPRSFQKKTRHYFIAAVERLWDYGMSSSPHVLRNRAQSGSVPQFKKVVFQEFTDGSFTQPLYRGELNEHLGLLGPYIRAEVEDNIMVTFRNQASRPYSFYSSLISYEEDQRQGAEPRKNFVKPNETKTYFWKVQHHMAPTKDEFDCKAWAYFSDVDLEKDVHSGLIGPLLVCHTNTLNPAHGRQVTVQEFALFFTIFDETKSWYFTENMERNCRGAPGTPGSGTASSSPGASPGTSSTGSPGASPGTSSTGSPGASPGTSSTGSPGSSPSASTGTGPGTPGSGTASSSPGASPGTSSTGSPGASPGTSSTGSPGASPGTSSTGSPGSSTPSGATGSPGSSTPSGATGSPGASPGTSSTGSPASSAPCNIQMEDPTFKENYRFHAINGYIMDTLPGLVMAQDQRIRWYLLSMGSNENIHSIHFSGHVFTVRKKEEYKMALYNLYPGVFETVEMLPSKAGIWRVECLIGEHLHAGMSTLFLVYSNKCQTPLGMASGHIRDFQITASGQYGQWAPKLARLHYSGSINAWSTKEPFSWIKVDLLAPMIIHGIKTQGARQKFSSLYISQFIIMYSLDGKKWQTYRGNSTGTLMVFFGNVDSSGIKHNIFNPPIIARYIRLHPTHYSIRSTLRMELMGCDLNSCSMPLGMESKAISDAQITASSYFTNMFATWSPSKARLHLQGRSNAWRPQVNNPKEWLQVDFQKTMKVTGVTTQGVKSLLTSMYVKEFLISSSQDGHQWTLFFQNGKVKVFQGNQDSFTPVVNSLDPPLLTRYLRIHPQSWVHQIALRMEVLGCEAQDLYGAPGTSESATPESGPGSEPATSGSETPGTSESATPESGPGSEPATSGSETPGTSESATPESGPGTSTEPSEGSAPGSPAGSPTSTEEGTSESATPESGPGSEPATSGSETPGTSESATPESGPGSPAGSPTSTEEGSPAGSPTSTEEGTSTEPSEGSAPGTSESATPESGPGTSESATPESGPGTSESATPESGPGSEPATSGSETPGSEPATSGSETPGSPAGSPTSTEEGTSTEPSEGSAPGTSTEPSEGSAPGSEPATSGSETPGTSESATPESGPGTSTEPSEGSAPASSEQKLISEEDLSPATGHHHHHH

SEQ ID NO: 1312 - DNA, 6612 bp, synthetic construct
  misc_feature 1..6612: note = Description of Artificial Sequence: Synthetic polynucleotide
  source 1..6612: mol_type = other DNA
gccaccagaagatactacctgggtgcagtggaactgtcatgggactatatgcaaagtgatctcggtgagctgcctgtggacgcaagatttcctcctagagtgccaaaatcttttccattcaacacctcagtcgtgtacaaaaagactctgtttgtagaattcacggatcaccttttcaacatcgctaagccaaggccaccctggatgggtctgctaggtcctaccatccaggctgaggtttatgatacagtggtcattacacttaagaacatggcttcccatcctgtcagtcttcatgctgttggtgtatcctactggaaagcttctgagggagctgaatatgatgatcagaccagtcaaagggagaaagaagatgataaagtcttccctggtggaagccatacatatgtctggcaggtcctgaaagagaatggtccaatggcctctgacccactgtgccttacctactcatatctttctcatgtggacctggtaaaagacttgaattcaggcctcattggagccctactagtatgtagagaagggagtctggccaaggaaaagacacagaccttgcacaaatttatactactttttgctgtatttgatgaagggaaaagttggcactcagaaacaaagaactccttgatgcaggatagggatgctgcatctgctcgggcctggcctaaaatgcacacagtcaatggttatgtaaacaggtctctgccaggtctgattggatgccacaggaaatcagtctattggcatgtgattggaatgggcaccactcctgaagtgcactcaatattcctcgaaggtcacacatttcttgtgaggaaccatcgccaggctagcttggaaatctcgccaataactttccttactgctcaaacactcttgatggaccttggacagtttctactgttttgtcatatctcttcccaccaacatgatggcatggaagcttatgtcaaagtagacagctgtccagaggaaccccaactacgaatgaaaaataatgaagaagcggaagactatgatgatgatcttactgattctgaaatggatgtggtcaggtttgatgatgacaactctccttcctttatccaaattcgctcagttgccaagaagcatcctaaaacttgggtacattacattgctgctgaagaggaggactgggactatgctcccttagtcctcgcccccgatgacagaagttataaaagtggcgcgccaaccagtacggagccgtccgaggggagcgcaccaggaagcccggctgggagcccgacttctaccgaagagggtacatctaccgaaccaagtgaaggttcagcaccaggcacctcaacagaaccctctgagggctcggcgcctggtacaagtgagtccgccaccccagaatccgggcctgggacaagcacagaaccttcggaagggagtgcccctggaacatccgaatcggcaaccccagaatcagggccaggatctgagcccgcgacttcgggctccgagacgcctgggacatccaccgagccctccgaaggatcagccccaggcaccagcacggagccctctgagggaagcgcacctggtaccagcgaaagcgcaactcccgaatcaggtcccggtacgagcgagtcggcgaccccggagagcgggccaggtgcctcgagccaatatttgaacaatggccctcagcggattggtaggaagtacaaaaaagtccgatttatggcatacacagatgaaacctttaagactcgtgaagctattcagcatgaatcaggaatcttgggacctttactttatggggaagttggagacacactgttgattatatttaagaatcaagcaagcagaccatataacatctaccctcacggaatcactgatgtccgtcctttgtattcaaggagattaccaaaaggtgtaaaacatttgaaggattttccaattctgccaggagaaatattcaaatataaatggacagtgactgtagaagatgggccaactaaatcagatcctcggtgcctgacccgctattactctagtttcgttaatatggagagagatctagcttcaggactcattggccctctcctcatctgctacaaagaatctgtagatcaaagaggaaaccagataatgtcagacaagaggaatgtcatcctgttttctgtatttgatgagaaccgaagctggtacctcacagagaatatacaacgctttctccccaatccagctggagtgcagcttgaggatccagagttccaagcctccaacatcatgcacagcatcaatggctatgtttttgatagtttgcagttgtcagtttgtttgcatgaggtggcatactggtacattctaagcattggagcacagactgacttcctttctgtcttcttctctggatataccttcaaacacaaaatggtctatgaagacacactcaccctattcccattctcaggagaaactgtcttcatgtcgatggaaaacccaggtctatggattctggggtgccacaactcagactttcggaacagaggcatgaccgccttactgaaggtttctagttgtgacaagaacactggtgattattacgaggacagttatgaagatatttcagcatacttgctgagtaaaaacaatgccattgaaccaagaagcttctctcaaaacggcgcgccaagtcccgctggaagcccaactagcaccgaagaggggacctcagagtccgccacccccgagtccggccctggctctgagcctgccactagcggctccgagactcctggcacatccgaaagcgctacacccgagagtggacccggcacctctaccgagcccagtgagggctccgcccctggaacaagcaccgagcccagcgaaggcagcgccccagggacctccacagagcccagtgaaggcagtgctcctggcaccagcaccgaaccaagcgagggctctgcacccgggacctccaccgagccaagcgaaggctctgcccctggcacttccaccgagcccagcgaaggcagcgcccctgggagccccgctggctctcccaccagcactgaggagggcacatctaccgaaccaagtgaaggctctgcaccaggtgcctcgagcccaccagtcttgaaacgccatcaagctgaaataactcgtactactcttcagtcagatcaagaggaaatcgattatgatgataccatatcagttgaaatgaagaaggaagattttgacatttatgatgaggatgaaaatcagagcccccgcagctttcaaaagaaaacacgacactattttattgctgcagtggagaggctctgggattatgggatgagtagctccccacatgttctaagaaacagggctcagagtggcagtgtccctcagttcaagaaagttgttttccaggaatttactgatggctcctttactcagcccttataccgtggagaactaaatgaacatttgggactcctggggccatatataagagcagaagttgaagataatatcatggtaactttcagaaatcaggcctctcgtccctattccttctattctagccttatttcttatgaggaagatcagaggcaaggagcagaacctagaaaaaactttgtcaagcctaatgaaaccaaaacttacttttggaaagtgcaacatcatatggcacccactaaagatgagtttgactgcaaagcctgggcttatttctctgatgttgacctggaaaaagatgtgcactcaggcctgattggaccccttctggtctgccacactaacacactgaaccctgctcatgggagacaagtgacagtacaggaatttgctctgtttttcaccatctttgatgagaccaaaagctggtacttcactgaaaatatggaaagaaactgcaggggcgcgccaggtacacccggatcgggtacagcgtcatcgagccccggtgcgtcacctggtacgtcgagcacggggtcgccaggggcgtcccctgggacgtcctcaacaggctcgcccggtgcgtcacccggcacgtcgtccacgggttcacctggtagctccccttccgcgtccactggcaccgggcctggaactccggggagcggcacagcgagctcgtcgccgggagcatcgcctgggacatcgagcaccgggtcgccaggagcatcgcccggaacatccagcacaggaagccccggcgcgtcgcccgggacatcaagcacaggttccccgggatcgagcacgccgtccggagccactggatcaccagggagctcgacaccttccggcgcaacgggatcgcccggagccagcccgggtacgtcaagcactggctcccctgcctcgagcgctccctgcaatatccagatggaagatcccacttttaaagagaattatcgcttccatgcaatcaatggctacataatggatacactacctggcttagtaatggctcaggatcaaaggattcgatggtatctgctcagcatgggcagcaatgaaaacatccattctattcatttcagtggacatgtgttcactgtacgaaaaaaagaggagtataaaatggcactgtacaatctctatccaggtgtttttgagacagtggaaatgttaccatccaaagctggaatttggcgggtggaatgccttattggcgagcatctacatgctgggatgagcacactttttctggtgtacagcaataagtgtcagactcccctgggaatggcttctggacacattagagattttcagattacagcttcaggacaatatggacagtgggccccaaagctggccagacttcattattccggatcaatcaatgcctggagcaccaaggagcccttttcttggatcaaggtggatctgttggcaccaatgattattcacggcatcaagacccagggtgcccgtcagaagttctccagcctctacatctctcagtttatcatcatgtatagtcttgatgggaagaagtggcagacttatcgaggaaattccactggaaccttaatggtcttctttggcaatgtggattcatctgggataaaacacaatatttttaaccctccaattattgctcgatacatccgtttgcacccaactcattatagcattcgcagcactcttcgcatggagttgatgggctgtgatttaaatagttgcagcatgccattgggaatggagagtaaagcaatatcagatgcacagattactgcttcatcctactttaccaatatgtttgccacctggtctccttcaaaagctcgacttcacctccaagggaggagtaatgcctggagacctcaggtgaataatccaaaagagtggctgcaagtggacttccagaagacaatgaaagtcacaggagtaactactcagggagtaaaatctctgcttaccagcatgtatgtgaaggagttcctcatctccagcagtcaagatggccatcagtggactctcttttttcagaatggcaaagtaaaggtttttcagggaaatcaagactccttcacacctgtggtgaactctctagacccaccgttactgactcgctaccttcgaattcacccccagagttgggtgcaccagattgccctgaggatggaggttctgggctgcgaggcacaggacctctacggcgcgccaggtacctcagagtctgctacccccgagtcagggccaggatcagagccagccacctccgggtctgagacacccgggacttccgagagtgccacccctgagtccggacccgggtccgagcccgccacttccggctccgaaactcccggcacaagcgagagcgctaccccagagtcaggaccaggaacatctacagagccctctgaaggctccgctccagggtccccagccggcagtcccactagcaccgaggagggaacctctgaaagcgccacacccgaatcagggccagggtctgagcctgctaccagcggcagcgagacaccaggcacctctgagtccgccacaccagagtccggacccggatctcccgctgggagccccacctccactgaggagggatctcctgctggctctccaacatctactgaggaaggtacctcaaccgagccatccgagggatcagctcccggcacctcagagtcggcaaccccggagtctggacccggaacttccgaaagtgccacaccagagtccggtcccgggacttcagaatcagcaacacccgagtccggccctgggtctgaacccgccacaagtggtagtgagacaccaggatcagaacctgctacctcagggtcagagacacccggatctccggcaggctcaccaacctccactgaggagggcaccagcacagaaccaagcgagggctccgcacccggaacaagcactgaacccagtgagggttcagcacccggctctgagccggccacaagtggcagtgagacacccggcacttcagagagtgccacccccgagagtggcccaggcactagtaccgagccctctgaaggcagtgcgccagcctcgagcgaacaaaaactcatctcagaagaggatctgtcacctgcaaccggtcatcatcaccatcaccattga

SEQ ID NO: 1313 - protein, 2203 aa, synthetic construct
  REGION 1..2203: note = Description of Artificial Sequence: Synthetic polypeptide
ATRRYYLGAVELSWDYMQSDLGELPVDARFPPRVPKSFPFNTSVVYKKTLFVEFTDHLFNIAKPRPPWMGLLGPTIQAEVYDTVVITLKNMASHPVSLHAVGVSYWKASEGAEYDDQTSQREKEDDKVFPGGSHTYVWQVLKENGPMASDPLCLTYSYLSHVDLVKDLNSGLIGALLVCREGSLAKEKTQTLHKFILLFAVFDEGKSWHSETKNSLMQDRDAASARAWPKMHTVNGYVNRSLPGLIGCHRKSVYWHVIGMGTTPEVHSIFLEGHTFLVRNHRQASLEISPITFLTAQTLLMDLGQFLLFCHISSHQHDGMEAYVKVDSCPEEPQLRMKNNEEAEDYDDDLTDSEMDVVRFDDDNSPSFIQIRSVAKKHPKTWVHYIAAEEEDWDYAPLVLAPDDRSYKSGAPTSTEPSEGSAPGSPAGSPTSTEEGTSTEPSEGSAPGTSTEPSEGSAPGTSESATPESGPGTSTEPSEGSAPGTSESATPESGPGSEPATSGSETPGTSTEPSEGSAPGTSTEPSEGSAPGTSESATPESGPGTSESATPESGPGASSQYLNNGPQRIGRKYKKVRFMAYTDETFKTREAIQHESGILGPLLYGEVGDTLLIIFKNQASRPYNIYPHGITDVRPLYSRRLPKGVKHLKDFPILPGEIFKYKWTVTVEDGPTKSDPRCLTRYYSSFVNMERDLASGLIGPLLICYKESVDQRGNQIMSDKRNVILFSVFDENRSWYLTENIQRFLPNPAGVQLEDPEFQASNIMHSINGYVFDSLQLSVCLHEVAYWYILSIGAQTDFLSVFFSGYTFKHKMVYEDTLTLFPFSGETVFMSMENPGLWILGCHNSDFRNRGMTALLKVSSCDKNTGDYYEDSYEDISAYLLSKNNAIEPRSFSQNGAPSPAGSPTSTEEGTSESATPESGPGSEPATSGSETPGTSESATPESGPGTSTEPSEGSAPGTSTEPSEGSAPGTSTEPSEGSAPGTSTEPSEGSAPGTSTEPSEGSAPGTSTEPSEGSAPGSPAGSPTSTEEGTSTEPSEGSAPGASSPPVLKRHQAEITRTTLQSDQEEIDYDDTISVEMKKEDFDIYDEDENQSPRSFQKKTRHYFIAAVERLWDYGMSSSPHVLRNRAQSGSVPQFKKVVFQEFTDGSFTQPLYRGELNEHLGLLGPYIRAEVEDNIMVTFRNQASRPYSFYSSLISYEEDQRQGAEPRKNFVKPNETKTYFWKVQHHMAPTKDEFDCKAWAYFSDVDLEKDVHSGLIGPLLVCHTNTLNPAHGRQVTVQEFALFFTIFDETKSWYFTENMERNCRAPCNIGAPSPAGSPTSTEEGTSESATPESGPGTSTEPSEGSAPGSPAGSPTSTEEGTSTEPSEGSAPGTSTEPSEGSAPGTSESATPESGPGSEPATSGSETPGSEPATSGSETPGSPAGSPTSTEEGTSESATPESGPGTSTEPSEGSAPGASSQMEDPTFKENYRFHAINGYIMDTLPGLVMAQDQRIRWYLLSMGSNENIHSIHFSGHVFTVRKKEEYKMALYNLYPGVFETVEMLPSKAGIWRVECLIGEHLHAGMSTLFLVYSNKCQTPLGMASGHIRDFQITASGQYGQWAPKLARLHYSGSINAWSTKEPFSWIKVDLLAPMIIHGIKTQGARQKFSSLYISQFIIMYSLDGKKWQTYRGNSTGTLMVFFGNVDSSGIKHNIFNPPIIARYIRLHPTHYSIRSTLRMELMGCDLNSCSMPLGMESKAISDAQITASSYFTNMFATWSPSKARLHLQGRSNAWRPQVNNPKEWLQVDFQKTMKVTGVTTQGVKSLLTSMYVKEFLISSSQDGHQWTLFFQNGKVKVFQGNQDSFTPVVNSLDPPLLTRYLRIHPQSWVHQIALRMEVLGCEAQDLYGAPGTSESATPESGPGSEPATSGSETPGTSESATPESGPGSEPATSGSETPGTSESATPESGPGTSTEPSEGSAPGSPAGSPTSTEEGTSESATPESGPGSEPATSGSETPGTSESATPESGPGSPAGSPTSTEEGSPAGSPTSTEEGTSTEPSEGSAPGTSESATPESGPGTSESATPESGPGTSESATPESGPGSEPATSGSETPGSEPATSGSETPGSPAGSPTSTEEGTSTEPSEGSAPGTSTEPSEGSAPGSEPATSGSETPGTSESATPESGPGTSTEPSEGSAPASSEQKLISEEDLSPATGHHHHHH

SEQ ID NO: 1314 - DNA, 6612 bp, synthetic construct
  misc_feature 1..6612: note = Description of Artificial Sequence: Synthetic polynucleotide
  source 1..6612: mol_type = other DNA
gccaccagaagatactacctgggtgcagtggaactgtcatgggactatatgcaaagtgatctcggtgagctgcctgtggacgcaagatttcctcctagagtgccaaaatcttttccattcaacacctcagtcgtgtacaaaaagactctgtttgtagaattcacggatcaccttttcaacatcgctaagccaaggccaccctggatgggtctgctaggtcctaccatccaggctgaggtttatgatacagtggtcattacacttaagaacatggcttcccatcctgtcagtcttcatgctgttggtgtatcctactggaaagcttctgagggagctgaatatgatgatcagaccagtcaaagggagaaagaagatgataaagtcttccctggtggaagccatacatatgtctggcaggtcctgaaagagaatggtccaatggcctctgacccactgtgccttacctactcatatctttctcatgtggacctggtaaaagacttgaattcaggcctcattggagccctactagtatgtagagaagggagtctggccaaggaaaagacacagaccttgcacaaatttatactactttttgctgtatttgatgaagggaaaagttggcactcagaaacaaagaactccttgatgcaggatagggatgctgcatctgctcgggcctggcctaaaatgcacacagtcaatggttatgtaaacaggtctctgccaggtctgattggatgccacaggaaatcagtctattggcatgtgattggaatgggcaccactcctgaagtgcactcaatattcctcgaaggtcacacatttcttgtgaggaaccatcgccaggctagcttggaaatctcgccaataactttccttactgctcaaacactcttgatggaccttggacagtttctactgttttgtcatatctcttcccaccaacatgatggcatggaagcttatgtcaaagtagacagctgtccagaggaaccccaactacgaatgaaaaataatgaagaagcggaagactatgatgatgatcttactgattctgaaatggatgtggtcaggtttgatgatgacaactctccttcctttatccaaattcgctcagttgccaagaagcatcctaaaacttgggtacattacattgctgctgaagaggaggactgggactatgctcccttagtcctcgcccccgatgacagaagttataaaagtggcgcgccaaccagtacggagccgtccgaggggagcgcaccaggaagcccggctgggagcccgacttctaccgaagagggtacatctaccgaaccaagtgaaggttcagcaccaggcacctcaacagaaccctctgagggctcggcgcctggtacaagtgagtccgccaccccagaatccgggcctgggacaagcacagaaccttcggaagggagtgcccctggaacatccgaatcggcaaccccagaatcagggccaggatctgagcccgcgacttcgggctccgagacgcctgggacatccaccgagccctccgaaggatcagccccaggcaccagcacggagccctctgagggaagcgcacctggtaccagcgaaagcgcaactcccgaatcaggtcccggtacgagcgagtcggcgaccccggagagcgggccaggtgcctcgagccaatatttgaacaatggccctcagcggattggtaggaagtacaaaaaagtccgatttatggcatacacagatgaaacctttaagactcgtgaagctattcagcatgaatcaggaatcttgggacctttactttatggggaagttggagacacactgttgattatatttaagaatcaagcaagcagaccatataacatctaccctcacggaatcactgatgtccgtcctttgtattcaaggagattaccaaaaggtgtaaaacatttgaaggattttccaattctgccaggagaaatattcaaatataaatggacagtgactgtagaagatgggccaactaaatcagatcctcggtgcctgacccgctattactctagtttcgttaatatggagagagatctagcttcaggactcattggccctctcctcatctgctacaaagaatctgtagatcaaagaggaaaccagataatgtcagacaagaggaatgtcatcctgttttctgtatttgatgagaaccgaagctggtacctcacagagaatatacaacgctttctccccaatccagctggagtgcagcttgaggatccagagttccaagcctccaacatcatgcacagcatcaatggctatgtttttgatagtttgcagttgtcagtttgtttgcatgaggtggcatactggtacattctaagcattggagcacagactgacttcctttctgtcttcttctctggatataccttcaaacacaaaatggtctatgaagacacactcaccctattcccattctcaggagaaactgtcttcatgtcgatggaaaacccaggtctatggattctggggtgccacaactcagactttcggaacagaggcatgaccgccttactgaaggtttctagttgtgacaagaacactggtgattattacgaggacagttatgaagatatttcagcatacttgctgagtaaaaacaatgccattgaaccaagaagcttctctcaaaacggcgcgccaagtcccgctggaagcccaactagcaccgaagaggggacctcagagtccgccacccccgagtccggccctggctctgagcctgccactagcggctccgagactcctggcacatccgaaagcgctacacccgagagtggacccggcacctctaccgagcccagtgagggctccgcccctggaacaagcaccgagcccagcgaaggcagcgccccagggacctccacagagcccagtgaaggcagtgctcctggcaccagcaccgaaccaagcgagggctctgcacccgggacctccaccgagccaagcgaaggctctgcccctggcacttccaccgagcccagcgaaggcagcgcccctgggagccccgctggctctcccaccagcactgaggagggcacatctaccgaaccaagtgaaggctctgcaccaggtgcctcgagcccaccagtcttgaaacgccatcaagctgaaataactcgtactactcttcagtcagatcaagaggaaatcgattatgatgataccatatcagttgaaatgaagaaggaagattttgacatttatgatgaggatgaaaatcagagcccccgcagctttcaaaagaaaacacgacactattttattgctgcagtggagaggctctgggattatgggatgagtagctccccacatgttctaagaaacagggctcagagtggcagtgtccctcagttcaagaaagttgttttccaggaatttactgatggctcctttactcagcccttataccgtggagaactaaatgaacatttgggactcctggggccatatataagagcagaagttgaagataatatcatggtaactttcagaaatcaggcctctcgtccctattccttctattctagccttatttcttatgaggaagatcagaggcaaggagcagaacctagaaaaaactttgtcaagcctaatgaaaccaaaacttacttttggaaagtgcaacatcatatggcacccactaaagatgagtttgactgcaaagcctgggcttatttctctgatgttgacctggaaaaagatgtgcactcaggcctgattggaccccttctggtctgccacactaacacactgaaccctgctcatgggagacaagtgacagtacaggaatttgctctgtttttcaccatctttgatgagaccaaaagctggtacttcactgaaaatatggaaagaaactgcagggctccctgcaatatcggcgcgccatctccagccgggtccccaacttcgaccgaggaagggacctccgagtcagctaccccggagtccggtcctggcacctccaccgaaccatcggagggcagcgcccctgggagccctgccgggagccctacaagcaccgaagagggcaccagtacagagccaagtgaggggagcgcccctggtactagtactgaaccatccgaggggtcagctccaggcacgagtgagtccgctacccccgagagcggaccgggctcagagcccgccacgagtggcagtgaaactccaggctcagaacccgccactagtgggtcagagactccaggcagccctgccggatcccctacgtccaccgaggagggaacatctgagtccgcaacacccgaatccggtccaggcacctccacggaacctagtgaaggctcggcaccaggtgcctcgagccagatggaagatcccacttttaaagagaattatcgcttccatgcaatcaatggctacataatggatacactacctggcttagtaatggctcaggatcaaaggattcgatggtatctgctcagcatgggcagcaatgaaaacatccattctattcatttcagtggacatgtgttcactgtacgaaaaaaagaggagtataaaatggcactgtacaatctctatccaggtgtttttgagacagtggaaatgttaccatccaaagctggaatttggcgggtggaatgccttattggcgagcatctacatgctgggatgagcacactttttctggtgtacagcaataagtgtcagactcccctgggaatggcttctggacacattagagattttcagattacagcttcaggacaatatggacagtgggccccaaagctggccagacttcattattccggatcaatcaatgcctggagcaccaaggagcccttttcttggatcaaggtggatctgttggcaccaatgattattcacggcatcaagacccagggtgcccgtcagaagttctccagcctctacatctctcagtttatcatcatgtatagtcttgatgggaagaagtggcagacttatcgaggaaattccactggaaccttaatggtcttctttggcaatgtggattcatctgggataaaacacaatatttttaaccctccaattattgctcgatacatccgtttgcacccaactcattatagcattcgcagcactcttcgcatggagttgatgggctgtgatttaaatagttgcagcatgccattgggaatggagagtaaagcaatatcagatgcacagattactgcttcatcctactttaccaatatgtttgccacctggtctccttcaaaagctcgacttcacctccaagggaggagtaatgcctggagacctcaggtgaataatccaaaagagtggctgcaagtggacttccagaagacaatgaaagtcacaggagtaactactcagggagtaaaatctctgcttaccagcatgtatgtgaaggagttcctcatctccagcagtcaagatggccatcagtggactctcttttttcagaatggcaaagtaaaggtttttcagggaaatcaagactccttcacacctgtggtgaactctctagacccaccgttactgactcgctaccttcgaattcacccccagagttgggtgcaccagattgccctgaggatggaggttctgggctgcgaggcacaggacctctacggcgcgccaggtacctcagagtctgctacccccgagtcagggccaggatcagagccagccacctccgggtctgagacacccgggacttccgagagtgccacccctgagtccggacccgggtccgagcccgccacttccggctccgaaactcccggcacaagcgagagcgctaccccagagtcaggaccaggaacatctacagagccctctgaaggctccgctccagggtccccagccggcagtcccactagcaccgaggagggaacctctgaaagcgccacacccgaatcagggccagggtctgagcctgctaccagcggcagcgagacaccaggcacctctgagtccgccacaccagagtccggacccggatctcccgctgggagccccacctccactgaggagggatctcctgctggctctccaacatctactgaggaaggtacctcaaccgagccatccgagggatcagctcccggcacctcagagtcggcaaccccggagtctggacccggaacttccgaaagtgccacaccagagtccggtcccgggacttcagaatcagcaacacccgagtccggccctgggtctgaacccgccacaagtggtagtgagacaccaggatcagaacctgctacctcagggtcagagacacccggatctccggcaggctcaccaacctccactgaggagggcaccagcacagaaccaagcgagggctccgcacccggaacaagcactgaacccagtgagggttcagcacccggctctgagccggccacaagtggcagtgagacacccggcacttcagagagtgccacccccgagagtggcccaggcactagtaccgagccctctgaaggcagtgcgccagcctcgagcgaacaaaaactcatctcagaagaggatctgtcacctgcaaccggtcatcatcaccatcaccattga

SEQ ID NO: 1315 - protein, 2203 aa, synthetic construct
  REGION 1..2203: note = Description of Artificial Sequence: Synthetic polypeptide
ATRRYYLGAVELSWDYMQSDLGELPVDARFPPRVPKSFPFNTSVVYKKTLFVEFTDHLFNIAKPRPPWMGLLGPTIQAEVYDTVVITLKNMASHPVSLHAVGVSYWKASEGAEYDDQTSQREKEDDKVFPGGSHTYVWQVLKENGPMASDPLCLTYSYLSHVDLVKDLNSGLIGALLVCREGSLAKEKTQTLHKFILLFAVFDEGKSWHSETKNSLMQDRDAASARAWPKMHTVNGYVNRSLPGLIGCHRKSVYWHVIGMGTTPEVHSIFLEGHTFLVRNHRQASLEISPITFLTAQTLLMDLGQFLLFCHISSHQHDGMEAYVKVDSCPEEPQLRMKNNEEAEDYDDDLTDSEMDVVRFDDDNSPSFIQIRSVAKKHPKTWVHYIAAEEEDWDYAPLVLAPDGAPGASPGTSSTGSPGSSPSASTGTGPGSSPSASTGTGPGTPGSGTASSSPGSSTPSGATGSPGSSPSASTGTGPGASPGTSSTGSPGTPGSGTASSSPGSSTPSGATGSPGTPGSGTASSSPGASPGTSSTGSPGASPGTSSTGSPASSDRSYKSQYLNNGPQRIGRKYKKVRFMAYTDETFKTREAIQHESGILGPLLYGEVGDTLLIIFKNQASRPYNIYPHGITDVRPLYSRRLPKGVKHLKDFPILPGEIFKYKWTVTVEDGPTKSDPRCLTRYYSSFVNMERDLASGLIGPLLICYKESVDQRGNQIMSDKRNVILFSVFDENRSWYLTENIQRFLPNPAGVQLEDPEFQASNIMHSINGYVFDSLQLSVCLHEVAYWYILSIGAQTDFLSVFFSGYTFKHKMVYEDTLTLFPFSGETVFMSMENPGLWILGCHNSDFRNRGMTALLKVSSCDKNTGDYYEDSYEDISAYLLSKNNAIEPRSFSQNGAPSPAGSPTSTEEGTSESATPESGPGSEPATSGSETPGTSESATPESGPGTSTEPSEGSAPGTSTEPSEGSAPGTSTEPSEGSAPGTSTEPSEGSAPGTSTEPSEGSAPGTSTEPSEGSAPGSPAGSPTSTEEGTSTEPSEGSAPGASSPPVLKRHQAEITRTTLQSDQEEIDYDDTISVEMKKEDFDIYDEDENQSPRSFQKKTRHYFIAAVERLWDYGMSSSPHVLRNRAQSGSVPQFKKVVFQEFTDGSFTQPLYRGELNEHLGLLGPYIRAEVEDNIMVTFRNQASRPYSFYSSLISYEEDQRQGAEPRKNFVKPNETKTYFWKVQHHMAPTKDEFDCKAWAYFSDVDLEKDVHSGLIGPLLVCHTNTLNPAHGRQVTVQEFALFFTIFDETKSWYFTENMERNCRAPCNIGAPSPAGSPTSTEEGTSESATPESGPGTSTEPSEGSAPGSPAGSPTSTEEGTSTEPSEGSAPGTSTEPSEGSAPGTSESATPESGPGSEPATSGSETPGSEPATSGSETPGSPAGSPTSTEEGTSESATPESGPGTSTEPSEGSAPGASSQMEDPTFKENYRFHAINGYIMDTLPGLVMAQDQRIRWYLLSMGSNENIHSIHFSGHVFTVRKKEEYKMALYNLYPGVFETVEMLPSKAGIWRVECLIGEHLHAGMSTLFLVYSNKCQTPLGMASGHIRDFQITASGQYGQWAPKLARLHYSGSINAWSTKEPFSWIKVDLLAPMIIHGIKTQGARQKFSSLYISQFIIMYSLDGKKWQTYRGNSTGTLMVFFGNVDSSGIKHNIFNPPIIARYIRLHPTHYSIRSTLRMELMGCDLNSCSMPLGMESKAISDAQITASSYFTNMFATWSPSKARLHLQGRSNAWRPQVNNPKEWLQVDFQKTMKVTGVTTQGVKSLLTSMYVKEFLISSSQDGHQWTLFFQNGKVKVFQGNQDSFTPVVNSLDPPLLTRYLRIHPQSWVHQIALRMEVLGCEAQDLYGAPGTSESATPESGPGSEPATSGSETPGTSESATPESGPGSEPATSGSETPGTSESATPESGPGTSTEPSEGSAPGSPAGSPTSTEEGTSESATPESGPGSEPATSGSETPGTSESATPESGPGSPAGSPTSTEEGSPAGSPTSTEEGTSTEPSEGSAPGTSESATPESGPGTSESATPESGPGTSESATPESGPGSEPATSGSETPGSEPATSGSETPGSPAGSPTSTEEGTSTEPSEGSAPGTSTEPSEGSAPGSEPATSGSETPGTSESATPESGPGTSTEPSEGSAPASSEQKLISEEDLSPATGHHHHHH

SEQ ID NO: 1316 - DNA, 6612 bp, synthetic construct
  misc_feature 1..6612: note = Description of Artificial Sequence: Synthetic polynucleotide
  source 1..6612: mol_type = other DNA
gccaccagaagatactacctgggtgcagtggaactgtcatgggactatatgcaaagtgatctcggtgagctgcctgtggacgcaagatttcctcctagagtgccaaaatcttttccattcaacacctcagtcgtgtacaaaaagactctgtttgtagaattcacggatcaccttttcaacatcgctaagccaaggccaccctggatgggtctgctaggtcctaccatccaggctgaggtttatgatacagtggtcattacacttaagaacatggcttcccatcctgtcagtcttcatgctgttggtgtatcctactggaaagcttctgagggagctgaatatgatgatcagaccagtcaaagggagaaagaagatgataaagtcttccctggtggaagccatacatatgtctggcaggtcctgaaagagaatggtccaatggcctctgacccactgtgccttacctactcatatctttctcatgtggacctggtaaaagacttgaattcaggcctcattggagccctactagtatgtagagaagggagtctggccaaggaaaagacacagaccttgcacaaatttatactactttttgctgtatttgatgaagggaaaagttggcactcagaaacaaagaactccttgatgcaggatagggatgctgcatctgctcgggcctggcctaaaatgcacacagtcaatggttatgtaaacaggtctctgccaggtctgattggatgccacaggaaatcagtctattggcatgtgattggaatgggcaccactcctgaagtgcactcaatattcctcgaaggtcacacatttcttgtgaggaaccatcgccaggctagcttggaaatctcgccaataactttccttactgctcaaacactcttgatggaccttggacagtttctactgttttgtcatatctcttcccaccaacatgatggcatggaagcttatgtcaaagtagacagctgtccagaggaaccccaactacgaatgaaaaataatgaagaagcggaagactatgatgatgatcttactgattctgaaatggatgtggtcaggtttgatgatgacaactctccttcctttatccaaattcgctcagttgccaagaagcatcctaaaacttgggtacattacattgctgctgaagaggaggactgggactatgctcccttagtcctcgcccccgatggcgcgccaggtgcctcgccgggaacatcatcaactggttcacccgggtcatccccctcggcctcaaccgggacgggtcccggctcatcccccagcgccagcactggaacaggtcctggcactcctggttccggtacggcatcgtcatccccgggaagctcaacaccgtccggagcgacaggatcacctggctcgtcaccttcggcgtcaactggaacggggccaggggcctcacccggaacgtcctcgactgggtcgcctggtacgccgggatcaggaacggcctcatcctcgcctgggtcctcaacgccctcgggtgcgactggttcgccgggaactcctggctcggggacggcctcgtcgtcgcctggggcatcaccggggacgagctccacggggtcccctggagcgtcaccggggacctcctcgacaggtagcccggcctcgagcgacagaagttataaaagtcaatatttgaacaatggccctcagcggattggtaggaagtacaaaaaagtccgatttatggcatacacagatgaaacctttaagactcgtgaagctattcagcatgaatcaggaatcttgggacctttactttatggggaagttggagacacactgttgattatatttaagaatcaagcaagcagaccatataacatctaccctcacggaatcactgatgtccgtcctttgtattcaaggagattaccaaaaggtgtaaaacatttgaaggattttccaattctgccaggagaaatattcaaatataaatggacagtgactgtagaagatgggccaactaaatcagatcctcggtgcctgacccgctattactctagtttcgttaatatggagagagatctagcttcaggactcattggccctctcctcatctgctacaaagaatctgtagatcaaagaggaaaccagataatgtcagacaagaggaatgtcatcctgttttctgtatttgatgagaaccgaagctggtacctcacagagaatatacaacgctttctccccaatccagctggagtgcagcttgaggatccagagttccaagcctccaacatcatgcacagcatcaatggctatgtttttgatagtttgcagttgtcagtttgtttgcatgaggtggcatactggtacattctaagcattggagcacagactgacttcctttctgtcttcttctctggatataccttcaaacacaaaatggtctatgaagacacactcaccctattcccattctcaggagaaactgtcttcatgtcgatggaaaacccaggtctatggattctggggtgccacaactcagactttcggaacagaggcatgaccgccttactgaaggtttctagttgtgacaagaacactggtgattattacgaggacagttatgaagatatttcagcatacttgctgagtaaaaacaatgccattgaaccaagaagcttctctcaaaacggcgcgccaagtcccgctggaagcccaactagcaccgaagaggggacctcagagtccgccacccccgagtccggccctggctctgagcctgccactagcggctccgagactcctggcacatccgaaagcgctacacccgagagtggacccggcacctctaccgagcccagtgagggctccgcccctggaacaagcaccgagcccagcgaaggcagcgccccagggacctccacagagcccagtgaaggcagtgctcctggcaccagcaccgaaccaagcgagggctctgcacccgggacctccaccgagccaagcgaaggctctgcccctggcacttccaccgagcccagcgaaggcagcgcccctgggagccccgctggctctcccaccagcactgaggagggcacatctaccgaaccaagtgaaggctctgcaccaggtgcctcgagcccaccagtcttgaaacgccatcaagctgaaataactcgtactactcttcagtcagatcaagaggaaatcgattatgatgataccatatcagttgaaatgaagaaggaagattttgacatttatgatgaggatgaaaatcagagcccccgcagctttcaaaagaaaacacgacactattttattgctgcagtggagaggctctgggattatgggatgagtagctccccacatgttctaagaaacagggctcagagtggcagtgtccctcagttcaagaaagttgttttccaggaatttactgatggctcctttactcagcccttataccgtggagaactaaatgaacatttgggactcctggggccatatataagagcagaagttgaagataatatcatggtaactttcagaaatcaggcctctcgtccctattccttctattctagccttatttcttatgaggaagatcagaggcaaggagcagaacctagaaaaaactttgtcaagcctaatgaaaccaaaacttacttttggaaagtgcaacatcatatggcacccactaaagatgagtttgactgcaaagcctgggcttatttctctgatgttgacctggaaaaagatgtgcactcaggcctgattggaccccttctggtctgccacactaacacactgaaccctgctcatgggagacaagtgacagtacaggaatttgctctgtttttcaccatctttgatgagaccaaaagctggtacttcactgaaaatatggaaagaaactgcagggctccctgcaatatcggcgcgccatctccagccgggtccccaacttcgaccgaggaagggacctccgagtcagctaccccggagtccggtcctggcacctccaccgaaccatcggagggcagcgcccctgggagccctgccgggagccctacaagcaccgaagagggcaccagtacagagccaagtgaggggagcgcccctggtactagtactgaaccatccgaggggtcagctccaggcacgagtgagtccgctacccccgagagcggaccgggctcagagcccgccacgagtggcagtgaaactccaggctcagaacccgccactagtgggtcagagactccaggcagccctgccggatcccctacgtccaccgaggagggaacatctgagtccgcaacacccgaatccggtccaggcacctccacggaacctagtgaaggctcggcaccaggtgcctcgagccagatggaagatcccacttttaaagagaattatcgcttccatgcaatcaatggctacataatggatacactacctggcttagtaatggctcaggatcaaaggattcgatggtatctgctcagcatgggcagcaatgaaaacatccattctattcatttcagtggacatgtgttcactgtacgaaaaaaagaggagtataaaatggcactgtacaatctctatccaggtgtttttgagacagtggaaatgttaccatccaaagctggaatttggcgggtggaatgccttattggcgagcatctacatgctgggatgagcacactttttctggtgtacagcaataagtgtcagactcccctgggaatggcttctggacacattagagattttcagattacagcttcaggacaatatggacagtgggccccaaagctggccagacttcattattccggatcaatcaatgcctggagcaccaaggagcccttttcttggatcaaggtggatctgttggcaccaatgattattcacggcatcaagacccagggtgcccgtcagaagttctccagcctctacatctctcagtttatcatcatgtatagtcttgatgggaagaagtggcagacttatcgaggaaattccactggaaccttaatggtcttctttggcaatgtggattcatctgggataaaacacaatatttttaaccctccaattattgctcgatacatccgtttgcacccaactcattatagcattcgcagcactcttcgcatggagttgatgggctgtgatttaaatagttgcagcatgccattgggaatggagagtaaagcaatatcagatgcacagattactgcttcatcctactttaccaatatgtttgccacctggtctccttcaaaagctcgacttcacctccaagggaggagtaatgcctggagacctcaggtgaataatccaaaagagtggctgcaagtggacttccagaagacaatgaaagtcacaggagtaactactcagggagtaaaatctctgcttaccagcatgtatgtgaaggagttcctcatctccagcagtcaagatggccatcagtggactctcttttttcagaatggcaaagtaaaggtttttcagggaaatcaagactccttcacacctgtggtgaactctctagacccaccgttactgactcgctaccttcgaattcacccccagagttgggtgcaccagattgccctgaggatggaggttctgggctgcgaggcacaggacctctacggcgcgccaggtacctcagagtctgctacccccgagtcagggccaggatcagagccagccacctccgggtctgagacacccgggacttccgagagtgccacccctgagtccggacccgggtccgagcccgccacttccggctccgaaactcccggcacaagcgagagcgctaccccagagtcaggaccaggaacatctacagagccctctgaaggctccgctccagggtccccagccggcagtcccactagcaccgaggagggaacctctgaaagcgccacacccgaatcagggccagggtctgagcctgctaccagcggcagcgagacaccaggcacctctgagtccgccacaccagagtccggacccggatctcccgctgggagccccacctccactgaggagggatctcctgctggctctccaacatctactgaggaaggtacctcaaccgagccatccgagggatcagctcccggcacctcagagtcggcaaccccggagtctggacccggaacttccgaaagtgccacaccagagtccggtcccgggacttcagaatcagcaacacccgagtccggccctgggtctgaacccgccacaagtggtagtgagacaccaggatcagaacctgctacctcagggtcagagacacccggatctccggcaggctcaccaacctccactgaggagggcaccagcacagaaccaagcgagggctccgcacccggaacaagcactgaacccagtgagggttcagcacccggctctgagccggccacaagtggcagtgagacacccggcacttcagagagtgccacccccgagagtggcccaggcactagtaccgagccctctgaaggcagtgcgccagcctcgagcgaacaaaaactcatctcagaagaggatctgtcacctgcaaccggtcatcatcaccatcaccattga

SEQ ID NO: 1317 - protein, 2203 aa, synthetic construct
  REGION 1..2203: note = Description of Artificial Sequence: Synthetic polypeptide
ATRRYYLGAVELSWDYMQSDLGELPVDARFPPRVPKSFPFNTSVVYKKTLFVEFTDHLFNIAKPRPPWMGLLGPTIQAEVYDTVVITLKNMASHPVSLHAVGVSYWKASEGAEYDDQTSQREKEDDKVFPGGSHTYVWQVLKENGPMASDPLCLTYSYLSHVDLVKDLNSGLIGALLVCREGSLAKEKTQTLHKFILLFAVFDEGKSWHSETKNSLMQDRDAASARAWPKMHTVNGYVNRSLPGLIGCHRKSVYWHVIGMGTTPEVHSIFLEGHTFLVRNHRQASLEISPITFLTAQTLLMDLGQFLLFCHISSHQHDGMEAYVKVDSCPEEPQLRMKNNEEAEDYDDDLTDSEMDVVRFDDDNSPSFIQIRSVAKKHPKTWVHYIAAEEEDWDYAPLVLAPDGAPTSTEPSEGSAPGSPAGSPTSTEEGTSTEPSEGSAPGTSTEPSEGSAPGTSESATPESGPGTSTEPSEGSAPGTSESATPESGPGSEPATSGSETPGTSTEPSEGSAPGTSTEPSEGSAPGTSESATPESGPGTSESATPESGPGASSDRSYKSQYLNNGPQRIGRKYKKVRFMAYTDETFKTREAIQHESGILGPLLYGEVGDTLLIIFKNQASRPYNIYPHGITDVRPLYSRRLPKGVKHLKDFPILPGEIFKYKWTVTVEDGPTKSDPRCLTRYYSSFVNMERDLASGLIGPLLICYKESVDQRGNQIMSDKRNVILFSVFDENRSWYLTENIQRFLPNPAGVQLEDPEFQASNIMHSINGYVFDSLQLSVCLHEVAYWYILSIGAQTDFLSVFFSGYTFKHKMVYEDTLTLFPFSGETVFMSMENPGLWILGCHNSDFRNRGMTALLKVSSCDKNTGDYYEDSYEDISAYLLSKNNAIEPRSFSQNGAPSPAGSPTSTEEGTSESATPESGPGSEPATSGSETPGTSESATPESGPGTSTEPSEGSAPGTSTEPSEGSAPGTSTEPSEGSAPGTSTEPSEGSAPGTSTEPSEGSAPGTSTEPSEGSAPGSPAGSPTSTEEGTSTEPSEGSAPGASSPPVLKRHQAEITRTTLQSDQEEIDYDDTISVEMKKEDFDIYDEDENQSPRSFQKKTRHYFIAAVERLWDYGMSSSPHVLRNRAQSGSVPQFKKVVFQEFTDGSFTQPLYRGELNEHLGLLGPYIRAEVEDNIMVTFRNQASRPYSFYSSLISYEEDQRQGAEPRKNFVKPNETKTYFWKVQHHMAPTKDEFDCKAWAYFSDVDLEKDVHSGLIGPLLVCHTNTLNPAHGRQVTVQEFALFFTIFDETKSWYFTENMERNCRAPCNIGAPSPAGSPTSTEEGTSESATPESGPGTSTEPSEGSAPGSPAGSPTSTEEGTSTEPSEGSAPGTSTEPSEGSAPGTSESATPESGPGSEPATSGSETPGSEPATSGSETPGSPAGSPTSTEEGTSESATPESGPGTSTEPSEGSAPGASSQMEDPTFKENYRFHAINGYIMDTLPGLVMAQDQRIRWYLLSMGSNENIHSIHFSGHVFTVRKKEEYKMALYNLYPGVFETVEMLPSKAGIWRVECLIGEHLHAGMSTLFLVYSNKCQTPLGMASGHIRDFQITASGQYGQWAPKLARLHYSGSINAWSTKEPFSWIKVDLLAPMIIHGIKTQGARQKFSSLYISQFIIMYSLDGKKWQTYRGNSTGTLMVFFGNVDSSGIKHNIFNPPIIARYIRLHPTHYSIRSTLRMELMGCDLNSCSMPLGMESKAISDAQITASSYFTNMFATWSPSKARLHLQGRSNAWRPQVNNPKEWLQVDFQKTMKVTGVTTQGVKSLLTSMYVKEFLISSSQDGHQWTLFFQNGKVKVFQGNQDSFTPVVNSLDPPLLTRYLRIHPQSWVHQIALRMEVLGCEAQDLYGAPGTSESATPESGPGSEPATSGSETPGTSESATPESGPGSEPATSGSETPGTSESATPESGPGTSTEPSEGSAPGSPAGSPTSTEEGTSESATPESGPGSEPATSGSETPGTSESATPESGPGSPAGSPTSTEEGSPAGSPTSTEEGTSTEPSEGSAPGTSESATPESGPGTSESATPESGPGTSESATPESGPGSEPATSGSETPGSEPATSGSETPGSPAGSPTSTEEGTSTEPSEGSAPGTSTEPSEGSAPGSEPATSGSETPGTSESATPESGPGTSTEPSEGSAPASSEQKLISEEDLSPATGHHHHHH

SEQ ID NO: 1318 - DNA, 6612 bp, synthetic construct
  misc_feature 1..6612: note = Description of Artificial Sequence: Synthetic polynucleotide
  source 1..6612: mol_type = other DNA
gccaccagaagatactacctgggtgcagtggaactgtcatgggactatatgcaaagtgatctcggtgagctgcctgtggacgcaagatttcctcctagagtgccaaaatcttttccattcaacacctcagtcgtgtacaaaaagactctgtttgtagaattcacggatcaccttttcaacatcgctaagccaaggccaccctggatgggtctgctaggtcctaccatccaggctgaggtttatgatacagtggtcattacacttaagaacatggcttcccatcctgtcagtcttcatgctgttggtgtatcctactggaaagcttctgagggagctgaatatgatgatcagaccagtcaaagggagaaagaagatgataaagtcttccctggtggaagccatacatatgtctggcaggtcctgaaagagaatggtccaatggcctctgacccactgtgccttacctactcatatctttctcatgtggacctggtaaaagacttgaattcaggcctcattggagccctactagtatgtagagaagggagtctggccaaggaaaagacacagaccttgcacaaatttatactactttttgctgtatttgatgaagggaaaagttggcactcagaaacaaagaactccttgatgcaggatagggatgctgcatctgctcgggcctggcctaaaatgcacacagtcaatggttatgtaaacaggtctctgccaggtctgattggatgccacaggaaatcagtctattggcatgtgattggaatgggcaccactcctgaagtgcactcaatattcctcgaaggtcacacatttcttgtgaggaaccatcgccaggctagcttggaaatctcgccaataactttccttactgctcaaacactcttgatggaccttggacagtttctactgttttgtcatatctcttcccaccaacatgatggcatggaagcttatgtcaaagtagacagctgtccagaggaaccccaactacgaatgaaaaataatgaagaagcggaagactatgatgatgatcttactgattctgaaatggatgtggtcaggtttgatgatgacaactctccttcctttatccaaattcgctcagttgccaagaagcatcctaaaacttgggtacattacattgctgctgaagaggaggactgggactatgctcccttagtcctcgcccccgatggcgcgccaaccagtacggagccgtccgaggggagcgcaccaggaagcccggctgggagcccgacttctaccgaagagggtacatctaccgaaccaagtgaaggttcagcaccaggcacctcaacagaaccctctgagggctcggcgcctggtacaagtgagtccgccaccccagaatccgggcctgggacaagcacagaaccttcggaagggagtgcccctggaacatccgaatcggcaaccccagaatcagggccaggatctgagcccgcgacttcgggctccgagacgcctgggacatccaccgagccctccgaaggatcagccccaggcaccagcacggagccctctgagggaagcgcacctggtaccagcgaaagcgcaactcccgaatcaggtcccggtacgagcgagtcggcgaccccggagagcgggccaggtgcctcgagcgacagaagttataaaagtcaatatttgaacaatggccctcagcggattggtaggaagtacaaaaaagtccgatttatggcatacacagatgaaacctttaagactcgtgaagctattcagcatgaatcaggaatcttgggacctttactttatggggaagttggagacacactgttgattatatttaagaatcaagcaagcagaccatataacatctaccctcacggaatcactgatgtccgtcctttgtattcaaggagattaccaaaaggtgtaaaacatttgaaggattttccaattctgccaggagaaatattcaaatataaatggacagtgactgtagaagatgggccaactaaatcagatcctcggtgcctgacccgctattactctagtttcgttaatatggagagagatctagcttcaggactcattggccctctcctcatctgctacaaagaatctgtagatcaaagaggaaaccagataatgtcagacaagaggaatgtcatcctgttttctgtatttgatgagaaccgaagctggtacctcacagagaatatacaacgctttctccccaatccagctggagtgcagcttgaggatccagagttccaagcctccaacatcatgcacagcatcaatggctatgtttttgatagtttgcagttgtcagtttgtttgcatgaggtggcatactggtacattctaagcattggagcacagactgacttcctttctgtcttcttctctggatataccttcaaacacaaaatggtctatgaagacacactcaccctattcccattctcaggagaaactgtcttcatgtcgatggaaaacccaggtctatggattctggggtgccacaactcagactttcggaacagaggcatgaccgccttactgaaggtttctagttgtgacaagaacactggtgattattacgaggacagttatgaagatatttcagcatacttgctgagtaaaaacaatgccattgaaccaagaagcttctctcaaaacggcgcgccaagtcccgctggaagcccaactagcaccgaagaggggacctcagagtccgccacccccgagtccggccctggctctgagcctgccactagcggctccgagactcctggcacatccgaaagcgctacacccgagagtggacccggcacctctaccgagcccagtgagggctccgcccctggaacaagcaccgagcccagcgaaggcagcgccccagggacctccacagagcccagtgaaggcagtgctcctggcaccagcaccgaaccaagcgagggctctgcacccgggacctccaccgagccaagcgaaggctctgcccctggcacttccaccgagcccagcgaaggcagcgcccctgggagccccgctggctctcccaccagcactgaggagggcacatctaccgaaccaagtgaaggctctgcaccaggtgcctcgagcccaccagtcttgaaacgccatcaagctgaaataactcgtactactcttcagtcagatcaagaggaaatcgattatgatgataccatatcagttgaaatgaagaaggaagattttgacatttatgatgaggatgaaaatcagagcccccgcagctttcaaaagaaaacacgacactattttattgctgcagtggagaggctctgggattatgggatgagtagctccccacatgttctaagaaacagggctcagagtggcagtgtccctcagttcaagaaagttgttttccaggaatttactgatggctcctttactcagcccttataccgtggagaactaaatgaacatttgggactcctggggccatatataagagcagaagttgaagataatatcatggtaactttcagaaatcaggcctctcgtccctattccttctattctagccttatttcttatgaggaagatcagaggcaaggagcagaacctagaaaaaactttgtcaagcctaatgaaaccaaaacttacttttggaaagtgcaacatcatatggcacccactaaagatgagtttgactgcaaagcctgggcttatttctctgatgttgacctggaaaaagatgtgcactcaggcctgattggaccccttctggtctgccacactaacacactgaaccctgctcatgggagacaagtgacagtacaggaatttgctctgtttttcaccatctttgatgagaccaaaagctggtacttcactgaaaatatggaaagaaactgcagggctccctgcaatatcggcgcgccatctccagccgggtccccaacttcgaccgaggaagggacctccgagtcagctaccccggagtccggtcctggcacctccaccgaaccatcggagggcagcgcccctgggagccctgccgggagccctacaagcaccgaagagggcaccagtacagagccaagtgaggggagcgcccctggtactagtactgaaccatccgaggggtcagctccaggcacgagtgagtccgctacccccgagagcggaccgggctcagagcccgccacgagtggcagtgaaactccaggctcagaacccgccactagtgggtcagagactccaggcagccctgccggatcccctacgtccaccgaggagggaacatctgagtccgcaacacccgaatccggtccaggcacctccacggaacctagtgaaggctcggcaccaggtgcctcgagccagatggaagatcccacttttaaagagaattatcgcttccatgcaatcaatggctacataatggatacactacctggcttagtaatggctcaggatcaaaggattcgatggtatctgctcagcatgggcagcaatgaaaacatccattctattcatttcagtggacatgtgttcactgtacgaaaaaaagaggagtataaaatggcactgtacaatctctatccaggtgtttttgagacagtggaaatgttaccatccaaagctggaatttggcgggtggaatgccttattggcgagcatctacatgctgggatgagcacactttttctggtgtacagcaataagtgtcagactcccctgggaatggcttctggacacattagagattttcagattacagcttcaggacaatatggacagtgggccccaaagctggccagacttcattattccggatcaatcaatgcctggagcaccaaggagcccttttcttggatcaaggtggatctgttggcaccaatgattattcacggcatcaagacccagggtgcccgtcagaagttctccagcctctacatctctcagtttatcatcatgtatagtcttgatgggaagaagtggcagacttatcgaggaaattccactggaaccttaatggtcttctttggcaatgtggattcatctgggataaaacacaatatttttaaccctccaattattgctcgatacatccgtttgcacccaactcattatagcattcgcagcactcttcgcatggagttgatgggctgtgatttaaatagttgcagcatgccattgggaatggagagtaaagcaatatcagatgcacagattactgcttcatcctactttaccaatatgtttgccacctggtctccttcaaaagctcgacttcacctccaagggaggagtaatgcctggagacctcaggtgaataatccaaaagagtggctgcaagtggacttccagaagacaatgaaagtcacaggagtaactactcagggagtaaaatctctgcttaccagcatgtatgtgaaggagttcctcatctccagcagtcaagatggccatcagtggactctcttttttcagaatggcaaagtaaaggtttttcagggaaatcaagactccttcacacctgtggtgaactctctagacccaccgttactgactcgctaccttcgaattcacccccagagttgggtgcaccagattgccctgaggatggaggttctgggctgcgaggcacaggacctctacggcgcgccaggtacctcagagtctgctacccccgagtcagggccaggatcagagccagccacctccgggtctgagacacccgggacttccgagagtgccacccctgagtccggacccgggtccgagcccgccacttccggctccgaaactcccggcacaagcgagagcgctaccccagagtcaggaccaggaacatctacagagccctctgaaggctccgctccagggtccccagccggcagtcccactagcaccgaggagggaacctctgaaagcgccacacccgaatcagggccagggtctgagcctgctaccagcggcagcgagacaccaggcacctctgagtccgccacaccagagtccggacccggatctcccgctgggagccccacctccactgaggagggatctcctgctggctctccaacatctactgaggaaggtacctcaaccgagccatccgagggatcagctcccggcacctcagagtcggcaaccccggagtctggacccggaacttccgaaagtgccacaccagagtccggtcccgggacttcagaatcagcaacacccgagtccggccctgggtctgaacccgccacaagtggtagtgagacaccaggatcagaacctgctacctcagggtcagagacacccggatctccggcaggctcaccaacctccactgaggagggcaccagcacagaaccaagcgagggctccgcacccggaacaagcactgaacccagtgagggttcagcacccggctctgagccggccacaagtggcagtgagacacccggcacttcagagagtgccacccccgagagtggcccaggcactagtaccgagccctctgaaggcagtgcgccagcctcgagcgaacaaaaactcatctcagaagaggatctgtcacctgcaaccggtcatcatcaccatcaccattga

SEQ ID NO: 1319 - protein, 2203 aa, synthetic construct
  REGION 1..2203: note = Description of Artificial Sequence: Synthetic polypeptide
ATRRYYLGAVELSWDYMQSDLGELPVDARFPPRVPKSFPFNTSVVYKKTLFVEFTDHLFNIAKPRPPWMGLLGPTIQAEVYDTVVITLKNMASHPVSLHAVGVSYWKASEGAEYDDQTSQREKEDDKVFPGGSHTYVWQVLKENGPMASDPLCLTYSYLSHVDLVKDLNSGLIGALLVCREGSLAKEKTQTLHKFILLFAVFDEGKSWHSETKNSLMQDRDAASARAWPKMHTVNGYVNRSLPGLIGCHRKSVYWHVIGMGTTPEVHSIFLEGHTFLVRNHRQASLEISPITFLTAQTLLMDLGQFLLFCHISSHQHDGMEAYVKVDSCPEEPQLRMKNNEEAEDYDDDLTDSEMDVVRFDDDNSPSFIQIRSVAKKHPKTWVHYIAAEEEDWDYAPLVLAPDGAPGASPGTSSTGSPGSSPSASTGTGPGSSPSASTGTGPGTPGSGTASSSPGSSTPSGATGSPGSSPSASTGTGPGASPGTSSTGSPGTPGSGTASSSPGSSTPSGATGSPGTPGSGTASSSPGASPGTSSTGSPGASPGTSSTGSPASSDRSYKSQYLNNGPQRIGRKYKKVRFMAYTDETFKTREAIQHESGILGPLLYGEVGDTLLIIFKNQASRPYNIYPHGITDVRPLYSRRLPKGVKHLKDFPILPGEIFKYKWTVTVEDGPTKSDPRCLTRYYSSFVNMERDLASGLIGPLLICYKESVDQRGNQIMSDKRNVILFSVFDENRSWYLTENIQRFLPNPAGVQLEDPEFQASNIMHSINGYVFDSLQLSVCLHEVAYWYILSIGAQTDFLSVFFSGYTFKHKMVYEDTLTLFPFSGETVFMSMENPGLWILGCHNSDFRNRGMTALLKVSSCDKNTGDYYEDSYEDISAYLLSKNNAIEPRSFSQNGAPSPAGSPTSTEEGTSESATPESGPGSEPATSGSETPGTSESATPESGPGTSTEPSEGSAPGTSTEPSEGSAPGTSTEPSEGSAPGTSTEPSEGSAPGTSTEPSEGSAPGTSTEPSEGSAPGSPAGSPTSTEEGTSTEPSEGSAPGASSPPVLKRHQAEITRTTLQSDQEEIDYDDTISVEMKKEDFDIYDEDENQSPRSFQKKTRHYFIAAVERLWDYGMSSSPHVLRNRAQSGSVPQFKKVVFQEFTDGSFTQPLYRGELNEHLGLLGPYIRAEVEDNIMVTFRNQASRPYSFYSSLISYEEDQRQGAEPRKNFVKPNETKTYFWKVQHHMAPTKDEFDCKAWAYFSDVDLEKDVHSGLIGPLLVCHTNTLNPAHGRQVTVQEFALFFTIFDETKSWYFTENMERNCRAPCNIGAPGTPGSGTASSSPGASPGTSSTGSPGASPGTSSTGSPGASPGTSSTGSPGSSPSASTGTGPGTPGSGTASSSPGASPGTSSTGSPGASPGTSSTGSPGASPGTSSTGSPGSSTPSGATGSPGSSTPSGATGSPGASPGTSSTGSPASSQMEDPTFKENYRFHAINGYIMDTLPGLVMAQDQRIRWYLLSMGSNENIHSIHFSGHVFTVRKKEEYKMALYNLYPGVFETVEMLPSKAGIWRVECLIGEHLHAGMSTLFLVYSNKCQTPLGMASGHIRDFQITASGQYGQWAPKLARLHYSGSINAWSTKEPFSWIKVDLLAPMIIHGIKTQGARQKFSSLYISQFIIMYSLDGKKWQTYRGNSTGTLMVFFGNVDSSGIKHNIFNPPIIARYIRLHPTHYSIRSTLRMELMGCDLNSCSMPLGMESKAISDAQITASSYFTNMFATWSPSKARLHLQGRSNAWRPQVNNPKEWLQVDFQKTMKVTGVTTQGVKSLLTSMYVKEFLISSSQDGHQWTLFFQNGKVKVFQGNQDSFTPVVNSLDPPLLTRYLRIHPQSWVHQIALRMEVLGCEAQDLYGAPGTSESATPESGPGSEPATSGSETPGTSESATPESGPGSEPATSGSETPGTSESATPESGPGTSTEPSEGSAPGSPAGSPTSTEEGTSESATPESGPGSEPATSGSETPGTSESATPESGPGSPAGSPTSTEEGSPAGSPTSTEEGTSTEPSEGSAPGTSESATPESGPGTSESATPESGPGTSESATPESGPGSEPATSGSETPGSEPATSGSETPGSPAGSPTSTEEGTSTEPSEGSAPGTSTEPSEGSAPGSEPATSGSETPGTSESATPESGPGTSTEPSEGSAPASSEQKLISEEDLSPATGHHHHHH

SEQ ID NO: 1320 - DNA, 6612 bp, synthetic construct
  misc_feature 1..6612: note = Description of Artificial Sequence: Synthetic polynucleotide
  source 1..6612: mol_type = other DNA
gccaccagaagatactacctgggtgcagtggaactgtcatgggactatatgcaaagtgatctcggtgagctgcctgtggacgcaagatttcctcctagagtgccaaaatcttttccattcaacacctcagtcgtgtacaaaaagactctgtttgtagaattcacggatcaccttttcaacatcgctaagccaaggccaccctggatgggtctgctaggtcctaccatccaggctgaggtttatgatacagtggtcattacacttaagaacatggcttcccatcctgtcagtcttcatgctgttggtgtatcctactggaaagcttctgagggagctgaatatgatgatcagaccagtcaaagggagaaagaagatgataaagtcttccctggtggaagccatacatatgtctggcaggtcctgaaagagaatggtccaatggcctctgacccactgtgccttacctactcatatctttctcatgtggacctggtaaaagacttgaattcaggcctcattggagccctactagtatgtagagaagggagtctggccaaggaaaagacacagaccttgcacaaatttatactactttttgctgtatttgatgaagggaaaagttggcactcagaaacaaagaactccttgatgcaggatagggatgctgcatctgctcgggcctggcctaaaatgcacacagtcaatggttatgtaaacaggtctctgccaggtctgattggatgccacaggaaatcagtctattggcatgtgattggaatgggcaccactcctgaagtgcactcaatattcctcgaaggtcacacatttcttgtgaggaaccatcgccaggctagcttggaaatctcgccaataactttccttactgctcaaacactcttgatggaccttggacagtttctactgttttgtcatatctcttcccaccaacatgatggcatggaagcttatgtcaaagtagacagctgtccagaggaaccccaactacgaatgaaaaataatgaagaagcggaagactatgatgatgatcttactgattctgaaatggatgtggtcaggtttgatgatgacaactctccttcctttatccaaattcgctcagttgccaagaagcatcctaaaacttgggtacattacattgctgctgaagaggaggactgggactatgctcccttagtcctcgcccccgatggcgcgccaggtgcctcgccgggaacatcatcaactggttcacccgggtcatccccctcggcctcaaccgggacgggtcccggctcatcccccagcgccagcactggaacaggtcctggcactcctggttccggtacggcatcgtcatccccgggaagctcaacaccgtccggagcgacaggatcacctggctcgtcaccttcggcgtcaactggaacggggccaggggcctcacccggaacgtcctcgactgggtcgcctggtacgccgggatcaggaacggcctcatcctcgcctgggtcctcaacgccctcgggtgcgactggttcgccgggaactcctggctcggggacggcctcgtcgtcgcctggggcatcaccggggacgagctccacggggtcccctggagcgtcaccggggacctcctcgacaggtagcccggcctcgagcgacagaagttataaaagtcaatatttgaacaatggccctcagcggattggtaggaagtacaaaaaagtccgatttatggcatacacagatgaaacctttaagactcgtgaagctattcagcatgaatcaggaatcttgggacctttactttatggggaagttggagacacactgttgattatatttaagaatcaagcaagcagaccatataacatctaccctcacggaatcactgatgtccgtcctttgtattcaaggagattaccaaaaggtgtaaaacatttgaaggattttccaattctgccaggagaaatattcaaatataaatggacagtgactgtagaagatgggccaactaaatcagatcctcggtgcctgacccgctattactctagtttcgttaatatggagagagatctagcttcaggactcattggccctctcctcatctgctacaaagaatctgtagatcaaagaggaaaccagataatgtcagacaagaggaatgtcatcctgttttctgtatttgatgagaaccgaagctggtacctcacagagaatatacaacgctttctccccaatccagctggagtgcagcttgaggatccagagttccaagcctccaacatcatgcacagcatcaatggctatgtttttgatagtttgcagttgtcagtttgtttgcatgaggtggcatactggtacattctaagcattggagcacagactgacttcctttctgtcttcttctctggatataccttcaaacacaaaatggtctatgaagacacactcaccctattcccattctcaggagaaactgtcttcatgtcgatggaaaacccaggtctatggattctggggtgccacaactcagactttcggaacagaggcatgaccgccttactgaaggtttctagttgtgacaagaacactggtgattattacgaggacagttatgaagatatttcagcatacttgctgagtaaaaacaatgccattgaaccaagaagcttctctcaaaacggcgcgccaagtcccgctggaagcccaactagcaccgaagaggggacctcagagtccgccacccccgagtccggccctggctctgagcctgccactagcggctccgagactcctggcacatccgaaagcgctacacccgagagtggacccggcacctctaccgagcccagtgagggctccgcccctggaacaagcaccgagcccagcgaaggcagcgccccagggacctccacagagcccagtgaaggcagtgctcctggcaccagcaccgaaccaagcgagggctctgcacccgggacctccaccgagccaagcgaaggctctgcccctggcacttccaccgagcccagcgaaggcagcgcccctgggagccccgctggctctcccaccagcactgaggagggcacatctaccgaaccaagtgaaggctctgcaccaggtgcctcgagcccaccagtcttgaaacgccatcaagctgaaataactcgtactactcttcagtcagatcaagaggaaatcgattatgatgataccatatcagttgaaatgaagaaggaagattttgacatttatgatgaggatgaaaatcagagcccccgcagctttcaaaagaaaacacgacactattttattgctgcagtggagaggctctgggattatgggatgagtagctccccacatgttctaagaaacagggctcagagtggcagtgtccctcagttcaagaaagttgttttccaggaatttactgatggctcctttactcagcccttataccgtggagaactaaatgaacatttgggactcctggggccatatataagagcagaagttgaagataatatcatggtaactttcagaaatcaggcctctcgtccctattccttctattctagccttatttcttatgaggaagatcagaggcaaggagcagaacctagaaaaaactttgtcaagcctaatgaaaccaaaacttacttttggaaagtgcaacatcatatggcacccactaaagatgagtttgactgcaaagcctgggcttatttctctgatgttgacctggaaaaagatgtgcactcaggcctgattggaccccttctggtctgccacactaacacactgaaccctgctcatgggagacaagtgacagtacaggaatttgctctgtttttcaccatctttgatgagaccaaaagctggtacttcactgaaaatatggaaagaaactgcagggctccctgcaatatcggcgcgccaggtacacccggatcgggtacagcgtcatcgagccccggtgcgtcacctggtacgtcgagcacggggtcgccaggggcgtcccctgggacgtcctcaacaggctcgcccggtgcgtcacccggcacgtcgtccacgggttcacctggtagctccccttccgcgtccactggcaccgggcctggaactccggggagcggcacagcgagctcgtcgccgggagcatcgcctgggacatcgagcaccgggtcgccaggagcatcgcccggaacatccagcacaggaagccccggcgcgtcgcccgggacatcaagcacaggttccccgggatcgagcacgccgtccggagccactggatcaccagggagctcgacaccttccggcgcaacgggatcgcccggagccagcccgggtacgtcaagcactggctcccctgcctcgagccagatggaagatcccacttttaaagagaattatcgcttccatgcaatcaatggctacataatggatacactacctggcttagtaatggctcaggatcaaaggattcgatggtatctgctcagcatgggcagcaatgaaaacatccattctattcatttcagtggacatgtgttcactgtacgaaaaaaagaggagtataaaatggcactgtacaatctctatccaggtgtttttgagacagtggaaatgttaccatccaaagctggaatttggcgggtggaatgccttattggcgagcatctacatgctgggatgagcacactttttctggtgtacagcaataagtgtcagactcccctgggaatggcttctggacacattagagattttcagattacagcttcaggacaatatggacagtgggccccaaagctggccagacttcattattccggatcaatcaatgcctggagcaccaaggagcccttttcttggatcaaggtggatctgttggcaccaatgattattcacggcatcaagacccagggtgcccgtcagaagttctccagcctctacatctctcagtttatcatcatgtatagtcttgatgggaagaagtggcagacttatcgaggaaattccactggaaccttaatggtcttctttggcaatgtggattcatctgggataaaacacaatatttttaaccctccaattattgctcgatacatccgtttgcacccaactcattatagcattcgcagcactcttcgcatggagttgatgggctgtgatttaaatagttgcagcatgccattgggaatggagagtaaagcaatatcagatgcacagattactgcttcatcctactttaccaatatgtttgccacctggtctccttcaaaagctcgacttcacctccaagggaggagtaatgcctggagacctcaggtgaataatccaaaagagtggctgcaagtggacttccagaagacaatgaaagtcacaggagtaactactcagggagtaaaatctctgcttaccagcatgtatgtgaaggagttcctcatctccagcagtcaagatggccatcagtggactctcttttttcagaatggcaaagtaaaggtttttcagggaaatcaagactccttcacacctgtggtgaactctctagacccaccgttactgactcgctaccttcgaattcacccccagagttgggtgcaccagattgccctgaggatggaggttctgggctgcgaggcacaggacctctacggcgcgccaggtacctcagagtctgctacccccgagtcagggccaggatcagagccagccacctccgggtctgagacacccgggacttccgagagtgccacccctgagtccggacccgggtccgagcccgccacttccggctccgaaactcccggcacaagcgagagcgctaccccagagtcaggaccaggaacatctacagagccctctgaaggctccgctccagggtccccagccggcagtcccactagcaccgaggagggaacctctgaaagcgccacacccgaatcagggccagggtctgagcctgctaccagcggcagcgagacaccaggcacctctgagtccgccacaccagagtccggacccggatctcccgctgggagccccacctccactgaggagggatctcctgctggctctccaacatctactgaggaaggtacctcaaccgagccatccgagggatcagctcccggcacctcagagtcggcaaccccggagtctggacccggaacttccgaaagtgccacaccagagtccggtcccgggacttcagaatcagcaacacccgagtccggccctgggtctgaacccgccacaagtggtagtgagacaccaggatcagaacctgctacctcagggtcagagacacccggatctccggcaggctcaccaacctccactgaggagggcaccagcacagaaccaagcgagggctccgcacccggaacaagcactgaacccagtgagggttcagcacccggctctgagccggccacaagtggcagtgagacacccggcacttcagagagtgccacccccgagagtggcccaggcactagtaccgagccctctgaaggcagtgcgccagcctcgagcgaacaaaaactcatctcagaagaggatctgtcacctgcaaccggtcatcatcaccatcaccattga

SEQ ID NO: 1321 - protein, 2203 aa, synthetic construct
  REGION 1..2203: note = Description of Artificial Sequence: Synthetic polypeptide
ATRRYYLGAVELSWDYMQSDLGELPVDARFPPRVPKSFPFNTSVVYKKTLFVEFTDHLFNIAKPRPPWMGLLGPTIQAEVYDTVVITLKNMASHPVSLHAVGVSYWKASEGAEYDDQTSQREKEDDKVFPGGSHTYVWQVLKENGPMASDPLCLTYSYLSHVDLVKDLNSGLIGALLVCREGSLAKEKTQTLHKFILLFAVFDEGKSWHSETKNSLMQDRDAASARAWPKMHTVNGYVNRSLPGLIGCHRKSVYWHVIGMGTTPEVHSIFLEGHTFLVRNHRQASLEISPITFLTAQTLLMDLGQFLLFCHISSHQHDGMEAYVKVDSCPEEPQLRMKNNEEAEDYDDDLTDSEMDVVRFDDDNSPSFIQIRSVAKKHPKTWVHYIAAEEEDWDYAPLVLAPDDRSYKSGAPTSTEPSEGSAPGSPAGSPTSTEEGTSTEPSEGSAPGTSTEPSEGSAPGTSESATPESGPGTSTEPSEGSAPGTSESATPESGPGSEPATSGSETPGTSTEPSEGSAPGTSTEPSEGSAPGTSESATPESGPGTSESATPESGPGASSQYLNNGPQRIGRKYKKVRFMAYTDETFKTREAIQHESGILGPLLYGEVGDTLLIIFKNQASRPYNIYPHGITDVRPLYSRRLPKGVKHLKDFPILPGEIFKYKWTVTVEDGPTKSDPRCLTRYYSSFVNMERDLASGLIGPLLICYKESVDQRGNQIMSDKRNVILFSVFDENRSWYLTENIQRFLPNPAGVQLEDPEFQASNIMHSINGYVFDSLQLSVCLHEVAYWYILSIGAQTDFLSVFFSGYTFKHKMVYEDTLTLFPFSGETVFMSMENPGLWILGCHNSDFRNRGMTALLKVSSCDKNTGDYYEDSYEDISAYLLSKNNAIEPRSFSQNGAPSPAGSPTSTEEGTSESATPESGPGSEPATSGSETPGTSESATPESGPGTSTEPSEGSAPGTSTEPSEGSAPGTSTEPSEGSAPGTSTEPSEGSAPGTSTEPSEGSAPGTSTEPSEGSAPGSPAGSPTSTEEGTSTEPSEGSAPGASSPPVLKRHQAEITRTTLQSDQEEIDYDDTISVEMKKEDFDIYDEDENQSPRSFQKKTRHYFIAAVERLWDYGMSSSPHVLRNRAQSGSVPQFKKVVFQEFTDGSFTQPLYRGELNEHLGLLGPYIRAEVEDNIMVTFRNQASRPYSFYSSLISYEEDQRQGAEPRKNFVKPNETKTYFWKVQHHMAPTKDEFDCKAWAYFSDVDLEKDVHSGLIGPLLVCHTNTLNPAHGRQVTVQEFALFFTIFDETKSWYFTENMERNCRAPCNIGAPGTPGSGTASSSPGASPGTSSTGSPGASPGTSSTGSPGASPGTSSTGSPGSSPSASTGTGPGTPGSGTASSSPGASPGTSSTGSPGASPGTSSTGSPGASPGTSSTGSPGSSTPSGATGSPGSSTPSGATGSPGASPGTSSTGSPASSQMEDPTFKENYRFHAINGYIMDTLPGLVMAQDQRIRWYLLSMGSNENIHSIHFSGHVFTVRKKEEYKMALYNLYPGVFETVEMLPSKAGIWRVECLIGEHLHAGMSTLFLVYSNKCQTPLGMASGHIRDFQITASGQYGQWAPKLARLHYSGSINAWSTKEPFSWIKVDLLAPMIIHGIKTQGARQKFSSLYISQFIIMYSLDGKKWQTYRGNSTGTLMVFFGNVDSSGIKHNIFNPPIIARYIRLHPTHYSIRSTLRMELMGCDLNSCSMPLGMESKAISDAQITASSYFTNMFATWSPSKARLHLQGRSNAWRPQVNNPKEWLQVDFQKTMKVTGVTTQGVKSLLTSMYVKEFLISSSQDGHQWTLFFQNGKVKVFQGNQDSFTPVVNSLDPPLLTRYLRIHPQSWVHQIALRMEVLGCEAQDLYGAPGTSESATPESGPGSEPATSGSETPGTSESATPESGPGSEPATSGSETPGTSESATPESGPGTSTEPSEGSAPGSPAGSPTSTEEGTSESATPESGPGSEPATSGSETPGTSESATPESGPGSPAGSPTSTEEGSPAGSPTSTEEGTSTEPSEGSAPGTSESATPESGPGTSESATPESGPGTSESATPESGPGSEPATSGSETPGSEPATSGSETPGSPAGSPTSTEEGTSTEPSEGSAPGTSTEPSEGSAPGSEPATSGSETPGTSESATPESGPGTSTEPSEGSAPASSEQKLISEEDLSPATGHHHHHH

SEQ ID NO: 1322 - DNA, 6612 bp, synthetic construct
  misc_feature 1..6612: note = Description of Artificial Sequence: Synthetic polynucleotide
  source 1..6612: mol_type = other DNA
gccaccagaagatactacctgggtgcagtggaactgtcatgggactatatgcaaagtgatctcggtgagctgcctgtggacgcaagatttcctcctagagtgccaaaatcttttccattcaacacctcagtcgtgtacaaaaagactctgtttgtagaattcacggatcaccttttcaacatcgctaagccaaggccaccctggatgggtctgctaggtcctaccatccaggctgaggtttatgatacagtggtcattacacttaagaacatggcttcccatcctgtcagtcttcatgctgttggtgtatcctactggaaagcttctgagggagctgaatatgatgatcagaccagtcaaagggagaaagaagatgataaagtcttccctggtggaagccatacatatgtctggcaggtcctgaaagagaatggtccaatggcctctgacccactgtgccttacctactcatatctttctcatgtggacctggtaaaagacttgaattcaggcctcattggagccctactagtatgtagagaagggagtctggccaaggaaaagacacagaccttgcacaaatttatactactttttgctgtatttgatgaagggaaaagttggcactcagaaacaaagaactccttgatgcaggatagggatgctgcatctgctcgggcctggcctaaaatgcacacagtcaatggttatgtaaacaggtctctgccaggtctgattggatgccacaggaaatcagtctattggcatgtgattggaatgggcaccactcctgaagtgcactcaatattcctcgaaggtcacacatttcttgtgaggaaccatcgccaggctagcttggaaatctcgccaataactttccttactgctcaaacactcttgatggaccttggacagtttctactgttttgtcatatctcttcccaccaacatgatggcatggaagcttatgtcaaagtagacagctgtccagaggaaccccaactacgaatgaaaaataatgaagaagcggaagactatgatgatgatcttactgattctgaaatggatgtggtcaggtttgatgatgacaactctccttcctttatccaaattcgctcagttgccaagaagcatcctaaaacttgggtacattacattgctgctgaagaggaggactgggactatgctcccttagtcctcgcccccgatgacagaagttataaaagtggcgcgccaaccagtacggagccgtccgaggggagcgcaccaggaagcccggctgggagcccgacttctaccgaagagggtacatctaccgaaccaagtgaaggttcagcaccaggcacctcaacagaaccctctgagggctcggcgcctggtacaagtgagtccgccaccccagaatccgggcctgggacaagcacagaaccttcggaagggagtgcccctggaacatccgaatcggcaaccccagaatcagggccaggatctgagcccgcgacttcgggctccgagacgcctgggacatccaccgagccctccgaaggatcagccccaggcaccagcacggagccctctgagggaagcgcacctggtaccagcgaaagcgcaactcccgaatcaggtcccggtacgagcgagtcggcgaccccggagagcgggccaggtgcctcgagccaatatttgaacaatggccctcagcggattggtaggaagtacaaaaaagtccgatttatggcatacacagatgaaacctttaagactcgtgaagctattcagcatgaatcaggaatcttgggacctttactttatggggaagttggagacacactgttgattatatttaagaatcaagcaagcagaccatataacatctaccctcacggaatcactgatgtccgtcctttgtattcaaggagattaccaaaaggtgtaaaacatttgaaggattttccaattctgccaggagaaatattcaaatataaatggacagtgactgtagaagatgggccaactaaatcagatcctcggtgcctgacccgctattactctagtttcgttaatatggagagagatctagcttcaggactcattggccctctcctcatctgctacaaagaatctgtagatcaaagaggaaaccagataatgtcagacaagaggaatgtcatcctgttttctgtatttgatgagaaccgaagctggtacctcacagagaatatacaacgctttctccccaatccagctggagtgcagcttgaggatccagagttccaagcctccaacatcatgcacagcatcaatggctatgtttttgatagtttgcagttgtcagtttgtttgcatgaggtggcatactggtacattctaagcattggagcacagactgacttcctttctgtcttcttctctggatataccttcaaacacaaaatggtctatgaagacacactcaccctattcccattctcaggagaaactgtcttcatgtcgatggaaaacccaggtctatggattctggggtgccacaactcagactttcggaacagaggcatgaccgccttactgaaggtttctagttgtgacaagaacactggtgattattacgaggacagttatgaagatatttcagcatacttgctgagtaaaaacaatgccattgaaccaagaagcttctctcaaaacggcgcgccaagtcccgctggaagcccaactagcaccgaagaggggacctcagagtccgccacccccgagtccggccctggctctgagcctgccactagcggctccgagactcctggcacatccgaaagcgctacacccgagagtggacccggcacctctaccgagcccagtgagggctccgcccctggaacaagcaccgagcccagcgaaggcagcgccccagggacctccacagagcccagtgaaggcagtgctcctggcaccagcaccgaaccaagcgagggctctgcacccgggacctccaccgagccaagcgaaggctctgcccctggcacttccaccgagcccagcgaaggcagcgcccctgggagccccgctggctctcccaccagcactgaggagggcacatctaccgaaccaagtgaaggctctgcaccaggtgcctcgagcccaccagtcttgaaacgccatcaagctgaaataactcgtactactcttcagtcagatcaagaggaaatcgattatgatgataccatatcagttgaaatgaagaaggaagattttgacatttatgatgaggatgaaaatcagagcccccgcagctttcaaaagaaaacacgacactattttattgctgcagtggagaggctctgggattatgggatgagtagctccccacatgttctaagaaacagggctcagagtggcagtgtccctcagttcaagaaagttgttttccaggaatttactgatggctcctttactcagcccttataccgtggagaactaaatgaacatttgggactcctggggccatatataagagcagaagttgaagataatatcatggtaactttcagaaatcaggcctctcgtccctattccttctattctagccttatttcttatgaggaagatcagaggcaaggagcagaacctagaaaaaactttgtcaagcctaatgaaaccaaaacttacttttggaaagtgcaacatcatatggcacccactaaagatgagtttgactgcaaagcctgggcttatttctctgatgttgacctggaaaaagatgtgcactcaggcctgattggaccccttctggtctgccacactaacacactgaaccctgctcatgggagacaagtgacagtacaggaatttgctctgtttttcaccatctttgatgagaccaaaagctggtacttcactgaaaatatggaaagaaactgcagggctccctgcaatatcggcgcgccaggtacacccggatcgggtacagcgtcatcgagccccggtgcgtcacctggtacgtcgagcacggggtcgccaggggcgtcccctgggacgtcctcaacaggctcgcccggtgcgtcacccggcacgtcgtccacgggttcacctggtagctccccttccgcgtccactggcaccgggcctggaactccggggagcggcacagcgagctcgtcgccgggagcatcgcctgggacatcgagcaccgggtcgccaggagcatcgcccggaacatccagcacaggaagccccggcgcgtcgcccgggacatcaagcacaggttccccgggatcgagcacgccgtccggagccactggatcaccagggagctcgacaccttccggcgcaacgggatcgcccggagccagcccgggtacgtcaagcactggctcccctgcctcgagccagatggaagatcccacttttaaagagaattatcgcttccatgcaatcaatggctacataatggatacactacctggcttagtaatggctcaggatcaaaggattcgatggtatctgctcagcatgggcagcaatgaaaacatccattctattcatttcagtggacatgtgttcactgtacgaaaaaaagaggagtataaaatggcactgtacaatctctatccaggtgtttttgagacagtggaaatgttaccatccaaagctggaatttggcgggtggaatgccttattggcgagcatctacatgctgggatgagcacactttttctggtgtacagcaataagtgtcagactcccctgggaatggcttctggacacattagagattttcagattacagcttcaggacaatatggacagtgggccccaaagctggccagacttcattattccggatcaatcaatgcctggagcaccaaggagcccttttcttggatcaaggtggatctgttggcaccaatgattattcacggcatcaagacccagggtgcccgtcagaagttctccagcctctacatctctcagtttatcatcatgtatagtcttgatgggaagaagtggcagacttatcgaggaaattccactggaaccttaatggtcttctttggcaatgtggattcatctgggataaaacacaatatttttaaccctccaattattgctcgatacatccgtttgcacccaactcattatagcattcgcagcactcttcgcatggagttgatgggctgtgatttaaatagttgcagcatgccattgggaatggagagtaaagcaatatcagatgcacagattactgcttcatcctactttaccaatatgtttgccacctggtctccttcaaaagctcgacttcacctccaagggaggagtaatgcctggagacctcaggtgaataatccaaaagagtggctgcaagtggacttccagaagacaatgaaagtcacaggagtaactactcagggagtaaaatctctgcttaccagcatgtatgtgaaggagttcctcatctccagcagtcaagatggccatcagtggactctcttttttcagaatggcaaagtaaaggtttttcagggaaatcaagactccttcacacctgtggtgaactctctagacccaccgttactgactcgctaccttcgaattcacccccagagttgggtgcaccagattgccctgaggatggaggttctgggctgcgaggcacaggacctctacggcgcgccaggtacctcagagtctgctacccccgagtcagggccaggatcagagccagccacctccgggtctgagacacccgggacttccgagagtgccacccctgagtccggacccgggtccgagcccgccacttccggctccgaaactcccggcacaagcgagagcgctaccccagagtcaggaccaggaacatctacagagccctctgaaggctccgctccagggtccccagccggcagtcccactagcaccgaggagggaacctctgaaagcgccacacccgaatcagggccagggtctgagcctgctaccagcggcagcgagacaccaggcacctctgagtccgccacaccagagtccggacccggatctcccgctgggagccccacctccactgaggagggatctcctgctggctctccaacatctactgaggaaggtacctcaaccgagccatccgagggatcagctcccggcacctcagagtcggcaaccccggagtctggacccggaacttccgaaagtgccacaccagagtccggtcccgggacttcagaatcagcaacacccgagtccggccctgggtctgaacccgccacaagtggtagtgagacaccaggatcagaacctgctacctcagggtcagagacacccggatctccggcaggctcaccaacctccactgaggagggcaccagcacagaaccaagcgagggctccgcacccggaacaagcactgaacccagtgagggttcagcacccggctctgagccggccacaagtggcagtgagacacccggcacttcagagagtgccacccccgagagtggcccaggcactagtaccgagccctctgaaggcagtgcgccagcctcgagcgaacaaaaactcatctcagaagaggatctgtcacctgcaaccggtcatcatcaccatcaccattga

SEQ ID NO: 1323 - protein, 2203 aa, synthetic construct
  REGION 1..2203: note = Description of Artificial Sequence: Synthetic polypeptide
ATRRYYLGAVELSWDYMQSDLGELPVDARFPPRVPKSFPFNTSVVYKKTLFVEFTDHLFNIAKPRPPWMGLLGPTIQAEVYDTVVITLKNMASHPVSLHAVGVSYWKASEGAEYDDQTSQREKEDDKVFPGGSHTYVWQVLKENGPMASDPLCLTYSYLSHVDLVKDLNSGLIGALLVCREGSLAKEKTQTLHKFILLFAVFDEGKSWHSETKNSLMQDRDAASARAWPKMHTVNGYVNRSLPGLIGCHRKSVYWHVIGMGTTPEVHSIFLEGHTFLVRNHRQASLEISPITFLTAQTLLMDLGQFLLFCHISSHQHDGMEAYVKVDSCPEEPQLRMKNNEEAEDYDDDLTDSEMDVVRFDDDNSPSFIQIRSVAKKHPKTWVHYIAAEEEDWDYAPLVLAPDGAPTSTEPSEGSAPGSPAGSPTSTEEGTSTEPSEGSAPGTSTEPSEGSAPGTSESATPESGPGTSTEPSEGSAPGTSESATPESGPGSEPATSGSETPGTSTEPSEGSAPGTSTEPSEGSAPGTSESATPESGPGTSESATPESGPGASSDRSYKSQYLNNGPQRIGRKYKKVRFMAYTDETFKTREAIQHESGILGPLLYGEVGDTLLIIFKNQASRPYNIYPHGITDVRPLYSRRLPKGVKHLKDFPILPGEIFKYKWTVTVEDGPTKSDPRCLTRYYSSFVNMERDLASGLIGPLLICYKESVDQRGNQIMSDKRNVILFSVFDENRSWYLTENIQRFLPNPAGVQLEDPEFQASNIMHSINGYVFDSLQLSVCLHEVAYWYILSIGAQTDFLSVFFSGYTFKHKMVYEDTLTLFPFSGETVFMSMENPGLWILGCHNSDFRNRGMTALLKVSSCDKNTGDYYEDSYEDISAYLLSKNNAIEPRSFSQNGAPSPAGSPTSTEEGTSESATPESGPGSEPATSGSETPGTSESATPESGPGTSTEPSEGSAPGTSTEPSEGSAPGTSTEPSEGSAPGTSTEPSEGSAPGTSTEPSEGSAPGTSTEPSEGSAPGSPAGSPTSTEEGTSTEPSEGSAPGASSPPVLKRHQAEITRTTLQSDQEEIDYDDTISVEMKKEDFDIYDEDENQSPRSFQKKTRHYFIAAVERLWDYGMSSSPHVLRNRAQSGSVPQFKKVVFQEFTDGSFTQPLYRGELNEHLGLLGPYIRAEVEDNIMVTFRNQASRPYSFYSSLISYEEDQRQGAEPRKNFVKPNETKTYFWKVQHHMAPTKDEFDCKAWAYFSDVDLEKDVHSGLIGPLLVCHTNTLNPAHGRQVTVQEFALFFTIFDETKSWYFTENMERNCRAPCNIGAPGTPGSGTASSSPGASPGTSSTGSPGASPGTSSTGSPGASPGTSSTGSPGSSPSASTGTGPGTPGSGTASSSPGASPGTSSTGSPGASPGTSSTGSPGASPGTSSTGSPGSSTPSGATGSPGSSTPSGATGSPGASPGTSSTGSPASSQMEDPTFKENYRFHAINGYIMDTLPGLVMAQDQRIRWYLLSMGSNENIHSIHFSGHVFTVRKKEEYKMALYNLYPGVFETVEMLPSKAGIWRVECLIGEHLHAGMSTLFLVYSNKCQTPLGMASGHIRDFQITASGQYGQWAPKLARLHYSGSINAWSTKEPFSWIKVDLLAPMIIHGIKTQGARQKFSSLYISQFIIMYSLDGKKWQTYRGNSTGTLMVFFGNVDSSGIKHNIFNPPIIARYIRLHPTHYSIRSTLRMELMGCDLNSCSMPLGMESKAISDAQITASSYFTNMFATWSPSKARLHLQGRSNAWRPQVNNPKEWLQVDFQKTMKVTGVTTQGVKSLLTSMYVKEFLISSSQDGHQWTLFFQNGKVKVFQGNQDSFTPVVNSLDPPLLTRYLRIHPQSWVHQIALRMEVLGCEAQDLYGAPGTSESATPESGPGSEPATSGSETPGTSESATPESGPGSEPATSGSETPGTSESATPESGPGTSTEPSEGSAPGSPAGSPTSTEEGTSESATPESGPGSEPATSGSETPGTSESATPESGPGSPAGSPTSTEEGSPAGSPTSTEEGTSTEPSEGSAPGTSESATPESGPGTSESATPESGPGTSESATPESGPGSEPATSGSETPGSEPATSGSETPGSPAGSPTSTEEGTSTEPSEGSAPGTSTEPSEGSAPGSEPATSGSETPGTSESATPESGPGTSTEPSEGSAPASSEQKLISEEDLSPATGHHHHHH

SEQ ID NO: 1324 - DNA, 6612 bp, synthetic construct
  misc_feature 1..6612: note = Description of Artificial Sequence: Synthetic polynucleotide
  source 1..6612: mol_type = other DNA
gccaccagaagatactacctgggtgcagtggaactgtcatgggactatatgcaaagtgatctcggtgagctgcctgtggacgcaagatttcctcctagagtgccaaaatcttttccattcaacacctcagtcgtgtacaaaaagactctgtttgtagaattcacggatcaccttttcaacatcgctaagccaaggccaccctggatgggtctgctaggtcctaccatccaggctgaggtttatgatacagtggtcattacacttaagaacatggcttcccatcctgtcagtcttcatgctgttggtgtatcctactggaaagcttctgagggagctgaatatgatgatcagaccagtcaaagggagaaagaagatgataaagtcttccctggtggaagccatacatatgtctggcaggtcctgaaagagaatggtccaatggcctctgacccactgtgccttacctactcatatctttctcatgtggacctggtaaaagacttgaattcaggcctcattggagccctactagtatgtagagaagggagtctggccaaggaaaagacacagaccttgcacaaatttatactactttttgctgtatttgatgaagggaaaagttggcactcagaaacaaagaactccttgatgcaggatagggatgctgcatctgctcgggcctggcctaaaatgcacacagtcaatggttatgtaaacaggtctctgccaggtctgattggatgccacaggaaatcagtctattggcatgtgattggaatgggcaccactcctgaagtgcactcaatattcctcgaaggtcacacatttcttgtgaggaaccatcgccaggctagcttggaaatctcgccaataactttccttactgctcaaacactcttgatggaccttggacagtttctactgttttgtcatatctcttcccaccaacatgatggcatggaagcttatgtcaaagtagacagctgtccagaggaaccccaactacgaatgaaaaataatgaagaagcggaagactatgatgatgatcttactgattctgaaatggatgtggtcaggtttgatgatgacaactctccttcctttatccaaattcgctcagttgccaagaagcatcctaaaacttgggtacattacattgctgctgaagaggaggactgggactatgctcccttagtcctcgcccccgatggcgcgccaaccagtacggagccgtccgaggggagcgcaccaggaagcccggctgggagcccgacttctaccgaagagggtacatctaccgaaccaagtgaaggttcagcaccaggcacctcaacagaaccctctgagggctcggcgcctggtacaagtgagtccgccaccccagaatccgggcctgggacaagcacagaaccttcggaagggagtgcccctggaacatccgaatcggcaaccccagaatcagggccaggatctgagcccgcgacttcgggctccgagacgcctgggacatccaccgagccctccgaaggatcagccccaggcaccagcacggagccctctgagggaagcgcacctggtaccagcgaaagcgcaactcccgaatcaggtcccggtacgagcgagtcggcgaccccggagagcgggccaggtgcctcgagcgacagaagttataaaagtcaatatttgaacaatggccctcagcggattggtaggaagtacaaaaaagtccgatttatggcatacacagatgaaacctttaagactcgtgaagctattcagcatgaatcaggaatcttgggacctttactttatggggaagttggagacacactgttgattatatttaagaatcaagcaagcagaccatataacatctaccctcacggaatcactgatgtccgtcctttgtattcaaggagattaccaaaaggtgtaaaacatttgaaggattttccaattctgccaggagaaatattcaaatataaatggacagtgactgtagaagatgggccaactaaatcagatcctcggtgcctgacccgctattactctagtttcgttaatatggagagagatctagcttcaggactcattggccctctcctcatctgctacaaagaatctgtagatcaaagaggaaaccagataatgtcagacaagaggaatgtcatcctgttttctgtatttgatgagaaccgaagctggtacctcacagagaatatacaacgctttctccccaatccagctggagtgcagcttgaggatccagagttccaagcctccaacatcatgcacagcatcaatggctatgtttttgatagtttgcagttgtcagtttgtttgcatgaggtggcatactggtacattctaagcattggagcacagactgacttcctttctgtcttcttctctggatataccttcaaacacaaaatggtctatgaagacacactcaccctattcccattctcaggagaaactgtcttcatgtcgatggaaaacccaggtctatggattctggggtgccacaactcagactttcggaacagaggcatgaccgccttactgaaggtttctagttgtgacaagaacactggtgattattacgaggacagttatgaagatatttcagcatacttgctgagtaaaaacaatgccattgaaccaagaagcttctctcaaaacggcgcgccaagtcccgctggaagcccaactagcaccgaagaggggacctcagagtccgccacccccgagtccggccctggctctgagcctgccactagcggctccgagactcctggcacatccgaaagcgctacacccgagagtggacccggcacctctaccgagcccagtgagggctccgcccctggaacaagcaccgagcccagcgaaggcagcgccccagggacctccacagagcccagtgaaggcagtgctcctggcaccagcaccgaaccaagcgagggctctgcacccgggacctccaccgagccaagcgaaggctctgcccctggcacttccaccgagcccagcgaaggcagcgcccctgggagccccgctggctctcccaccagcactgaggagggcacatctaccgaaccaagtgaaggctctgcaccaggtgcctcgagcccaccagtcttgaaacgccatcaagctgaaataactcgtactactcttcagtcagatcaagaggaaatcgattatgatgataccatatcagttgaaatgaagaaggaagattttgacatttatgatgaggatgaaaatcagagcccccgcagctttcaaaagaaaacacgacactattttattgctgcagtggagaggctctgggattatgggatgagtagctccccacatgttctaagaaacagggctcagagtggcagtgtccctcagttcaagaaagttgttttccaggaatttactgatggctcctttactcagcccttataccgtggagaactaaatgaacatttgggactcctggggccatatataagagcagaagttgaagataatatcatggtaactttcagaaatcaggcctctcgtccctattccttctattctagccttatttcttatgaggaagatcagaggcaaggagcagaacctagaaaaaactttgtcaagcctaatgaaaccaaaacttacttttggaaagtgcaacatcatatggcacccactaaagatgagtttgactgcaaagcctgggcttatttctctgatgttgacctggaaaaagatgtgcactcaggcctgattggaccccttctggtctgccacactaacacactgaaccctgctcatgggagacaagtgacagtacaggaatttgctctgtttttcaccatctttgatgagaccaaaagctggtacttcactgaaaatatggaaagaaactgcagggctccctgcaatatcggcgcgccaggtacacccggatcgggtacagcgtcatcgagccccggtgcgtcacctggtacgtcgagcacggggtcgccaggggcgtcccctgggacgtcctcaacaggctcgcccggtgcgtcacccggcacgtcgtccacgggttcacctggtagctccccttccgcgtccactggcaccgggcctggaactccggggagcggcacagcgagctcgtcgccgggagcatcgcctgggacatcgagcaccgggtcgccaggagcatcgcccggaacatccagcacaggaagccccggcgcgtcgcccgggacatcaagcacaggttccccgggatcgagcacgccgtccggagccactggatcaccagggagctcgacaccttccggcgcaacgggatcgcccggagccagcccgggtacgtcaagcactggctcccctgcctcgagccagatggaagatcccacttttaaagagaattatcgcttccatgcaatcaatggctacataatggatacactacctggcttagtaatggctcaggatcaaaggattcgatggtatctgctcagcatgggcagcaatgaaaacatccattctattcatttcagtggacatgtgttcactgtacgaaaaaaagaggagtataaaatggcactgtacaatctctatccaggtgtttttgagacagtggaaatgttaccatccaaagctggaatttggcgggtggaatgccttattggcgagcatctacatgctgggatgagcacactttttctggtgtacagcaataagtgtcagactcccctgggaatggcttctggacacattagagattttcagattacagcttcaggacaatatggacagtgggccccaaagctggccagacttcattattccggatcaatcaatgcctggagcaccaaggagcccttttcttggatcaaggtggatctgttggcaccaatgattattcacggcatcaagacccagggtgcccgtcagaagttctccagcctctacatctctcagtttatcatcatgtatagtcttgatgggaagaagtggcagacttatcgaggaaattccactggaaccttaatggtcttctttggcaatgtggattcatctgggataaaacacaatatttttaaccctccaattattgctcgatacatccgtttgcacccaactcattatagcattcgcagcactcttcgcatggagttgatgggctgtgatttaaatagttgcagcatgccattgggaatggagagtaaagcaatatcagatgcacagattactgcttcatcctactttaccaatatgtttgccacctggtctccttcaaaagctcgacttcacctccaagggaggagtaatgcctggagacctcaggtgaataatccaaaagagtggctgcaagtggacttccagaagacaatgaaagtcacaggagtaactactcagggagtaaaatctctgcttaccagcatgtatgtgaaggagttcctcatctccagcagtcaagatggccatcagtggactctcttttttcagaatggcaaagtaaaggtttttcagggaaatcaagactccttcacacctgtggtgaactctctagacccaccgttactgactcgctaccttcgaattcacccccagagttgggtgcaccagattgccctgaggatggaggttctgggctgcgaggcacaggacctctacggcgcgccaggtacctcagagtctgctacccccgagtcagggccaggatcagagccagccacctccgggtctgagacacccgggacttccgagagtgccacccctgagtccggacccgggtccgagcccgccacttccggctccgaaactcccggcacaagcgagagcgctaccccagagtcaggaccaggaacatctacagagccctctgaaggctccgctccagggtccccagccggcagtcccactagcaccgaggagggaacctctgaaagcgccacacccgaatcagggccagggtctgagcctgctaccagcggcagcgagacaccaggcacctctgagtccgccacaccagagtccggacccggatctcccgctgggagccccacctccactgaggagggatctcctgctggctctccaacatctactgaggaaggtacctcaaccgagccatccgagggatcagctcccggcacctcagagtcggcaaccccggagtctggacccggaacttccgaaagtgccacaccagagtccggtcccgggacttcagaatcagcaacacccgagtccggccctgggtctgaacccgccacaagtggtagtgagacaccaggatcagaacctgctacctcagggtcagagacacccggatctccggcaggctcaccaacctccactgaggagggcaccagcacagaaccaagcgagggctccgcacccggaacaagcactgaacccagtgagggttcagcacccggctctgagccggccacaagtggcagtgagacacccggcacttcagagagtgccacccccgagagtggcccaggcactagtaccgagccctctgaaggcagtgcgccagcctcgagcgaacaaaaactcatctcagaagaggatctgtcacctgcaaccggtcatcatcaccatcaccattga

SEQ ID NO: 1325 - protein, 2203 aa, synthetic construct
  REGION 1..2203: note = Description of Artificial Sequence: Synthetic polypeptide
ATRRYYLGAVELSWDYMQSDLGELPVDARFPPRVPKSFPFNTSVVYKKTLFVEFTDHLFNIAKPRPPWMGLLGPTIQAEVYDTVVITLKNMASHPVSLHAVGVSYWKASEGAEYDDQTSQREKEDDKVFPGGSHTYVWQVLKENGPMASDPLCLTYSYLSHVDLVKDLNSGLIGALLVCREGSLAKEKTQTLHKFILLFAVFDEGKSWHSETKNSLMQDRDAASARAWPKMHTVNGYVNRSLPGLIGCHRKSVYWHVIGMGTTPEVHSIFLEGHTFLVRNHRQASLEISPITFLTAQTLLMDLGQFLLFCHISSHQHDGMEAYVKVDSCPEEPQLRMKNNEEAEDYDDDLTDSEMDVVRFDDDNSPSFIQIRSVAKKHPKTWVHYIAAEEEDWDYAPLVLAPDDRSYKSGAPTSTEPSEGSAPGSPAGSPTSTEEGTSTEPSEGSAPGTSTEPSEGSAPGTSESATPESGPGTSTEPSEGSAPGTSESATPESGPGSEPATSGSETPGTSTEPSEGSAPGTSTEPSEGSAPGTSESATPESGPGTSESATPESGPGASSQYLNNGPQRIGRKYKKVRFMAYTDETFKTREAIQHESGILGPLLYGEVGDTLLIIFKNQASRPYNIYPHGITDVRPLYSRRLPKGVKHLKDFPILPGEIFKYKWTVTVEDGPTKSDPRCLTRYYSSFVNMERDLASGLIGPLLICYKESVDQRGNQIMSDKRNVILFSVFDENRSWYLTENIQRFLPNPAGVQLEDPEFQASNIMHSINGYVFDSLQLSVCLHEVAYWYILSIGAQTDFLSVFFSGYTFKHKMVYEDTLTLFPFSGETVFMSMENPGLWILGCHNSDFRNRGMTALLKVSSCDKNTGDYYEDSYEDISAYLLSKNNAIEPRSFSQNGAPSPAGSPTSTEEGTSESATPESGPGSEPATSGSETPGTSESATPESGPGTSTEPSEGSAPGTSTEPSEGSAPGTSTEPSEGSAPGTSTEPSEGSAPGTSTEPSEGSAPGTSTEPSEGSAPGSPAGSPTSTEEGTSTEPSEGSAPGASSPPVLKRHQAEITRTTLQSDQEEIDYDDTISVEMKKEDFDIYDEDENQSPRSFQKKTRHYFIAAVERLWDYGMSSSPHVLRNRAQSGSVPQFKKVVFQEFTDGSFTQPLYRGELNEHLGLLGPYIRAEVEDNIMVTFRNQASRPYSFYSSLISYEEDQRQGAEPRKNFVKPNETKTYFWKVQHHMAPTKDEFDCKAWAYFSDVDLEKDVHSGLIGPLLVCHTNTLNPAHGRQVTVQEFALFFTIFDETKSWYFTENMERNCRAPCNIQMEDPGAPSPAGSPTSTEEGTSESATPESGPGTSTEPSEGSAPGSPAGSPTSTEEGTSTEPSEGSAPGTSTEPSEGSAPGTSESATPESGPGSEPATSGSETPGSEPATSGSETPGSPAGSPTSTEEGTSESATPESGPGTSTEPSEGSAPGASSTFKENYRFHAINGYIMDTLPGLVMAQDQRIRWYLLSMGSNENIHSIHFSGHVFTVRKKEEYKMALYNLYPGVFETVEMLPSKAGIWRVECLIGEHLHAGMSTLFLVYSNKCQTPLGMASGHIRDFQITASGQYGQWAPKLARLHYSGSINAWSTKEPFSWIKVDLLAPMIIHGIKTQGARQKFSSLYISQFIIMYSLDGKKWQTYRGNSTGTLMVFFGNVDSSGIKHNIFNPPIIARYIRLHPTHYSIRSTLRMELMGCDLNSCSMPLGMESKAISDAQITASSYFTNMFATWSPSKARLHLQGRSNAWRPQVNNPKEWLQVDFQKTMKVTGVTTQGVKSLLTSMYVKEFLISSSQDGHQWTLFFQNGKVKVFQGNQDSFTPVVNSLDPPLLTRYLRIHPQSWVHQIALRMEVLGCEAQDLYGAPGTSESATPESGPGSEPATSGSETPGTSESATPESGPGSEPATSGSETPGTSESATPESGPGTSTEPSEGSAPGSPAGSPTSTEEGTSESATPESGPGSEPATSGSETPGTSESATPESGPGSPAGSPTSTEEGSPAGSPTSTEEGTSTEPSEGSAPGTSESATPESGPGTSESATPESGPGTSESATPESGPGSEPATSGSETPGSEPATSGSETPGSPAGSPTSTEEGTSTEPSEGSAPGTSTEPSEGSAPGSEPATSGSETPGTSESATPESGPGTSTEPSEGSAPASSEQKLISEEDLSPATGHHHHHH

SEQ ID NO: 1326 - DNA, 6612 bp, synthetic construct
  misc_feature 1..6612: note = Description of Artificial Sequence: Synthetic polynucleotide
  source 1..6612: mol_type = other DNA
gccaccagaagatactacctgggtgcagtggaactgtcatgggactatatgcaaagtgatctcggtgagctgcctgtggacgcaagatttcctcctagagtgccaaaatcttttccattcaacacctcagtcgtgtacaaaaagactctgtttgtagaattcacggatcaccttttcaacatcgctaagccaaggccaccctggatgggtctgctaggtcctaccatccaggctgaggtttatgatacagtggtcattacacttaagaacatggcttcccatcctgtcagtcttcatgctgttggtgtatcctactggaaagcttctgagggagctgaatatgatgatcagaccagtcaaagggagaaagaagatgataaagtcttccctggtggaagccatacatatgtctggcaggtcctgaaagagaatggtccaatggcctctgacccactgtgccttacctactcatatctttctcatgtggacctggtaaaagacttgaattcaggcctcattggagccctactagtatgtagagaagggagtctggccaaggaaaagacacagaccttgcacaaatttatactactttttgctgtatttgatgaagggaaaagttggcactcagaaacaaagaactccttgatgcaggatagggatgctgcatctgctcgggcctggcctaaaatgcacacagtcaatggttatgtaaacaggtctctgccaggtctgattggatgccacaggaaatcagtctattggcatgtgattggaatgggcaccactcctgaagtgcactcaatattcctcgaaggtcacacatttcttgtgaggaaccatcgccaggctagcttggaaatctcgccaataactttccttactgctcaaacactcttgatggaccttggacagtttctactgttttgtcatatctcttcccaccaacatgatggcatggaagcttatgtcaaagtagacagctgtccagaggaaccccaactacgaatgaaaaataatgaagaagcggaagactatgatgatgatcttactgattctgaaatggatgtggtcaggtttgatgatgacaactctccttcctttatccaaattcgctcagttgccaagaagcatcctaaaacttgggtacattacattgctgctgaagaggaggactgggactatgctcccttagtcctcgcccccgatgacagaagttataaaagtggcgcgccaaccagtacggagccgtccgaggggagcgcaccaggaagcccggctgggagcccgacttctaccgaagagggtacatctaccgaaccaagtgaaggttcagcaccaggcacctcaacagaaccctctgagggctcggcgcctggtacaagtgagtccgccaccccagaatccgggcctgggacaagcacagaaccttcggaagggagtgcccctggaacatccgaatcggcaaccccagaatcagggccaggatctgagcccgcgacttcgggctccgagacgcctgggacatccaccgagccctccgaaggatcagccccaggcaccagcacggagccctctgagggaagcgcacctggtaccagcgaaagcgcaactcccgaatcaggtcccggtacgagcgagtcggcgaccccggagagcgggccaggtgcctcgagccaatatttgaacaatggccctcagcggattggtaggaagtacaaaaaagtccgatttatggcatacacagatgaaacctttaagactcgtgaagctattcagcatgaatcaggaatcttgggacctttactttatggggaagttggagacacactgttgattatatttaagaatcaagcaagcagaccatataacatctaccctcacggaatcactgatgtccgtcctttgtattcaaggagattaccaaaaggtgtaaaacatttgaaggattttccaattctgccaggagaaatattcaaatataaatggacagtgactgtagaagatgggccaactaaatcagatcctcggtgcctgacccgctattactctagtttcgttaatatggagagagatctagcttcaggactcattggccctctcctcatctgctacaaagaatctgtagatcaaagaggaaaccagataatgtcagacaagaggaatgtcatcctgttttctgtatttgatgagaaccgaagctggtacctcacagagaatatacaacgctttctccccaatccagctggagtgcagcttgaggatccagagttccaagcctccaacatcatgcacagcatcaatggctatgtttttgatagtttgcagttgtcagtttgtttgcatgaggtggcatactggtacattctaagcattggagcacagactgacttcctttctgtcttcttctctggatataccttcaaacacaaaatggtctatgaagacacactcaccctattcccattctcaggagaaactgtcttcatgtcgatggaaaacccaggtctatggattctggggtgccacaactcagactttcggaacagaggcatgaccgccttactgaaggtttctagttgtgacaagaacactggtgattattacgaggacagttatgaagatatttcagcatacttgctgagtaaaaacaatgccattgaaccaagaagcttctctcaaaacggcgcgccaagtcccgctggaagcccaactagcaccgaagaggggacctcagagtccgccacccccgagtccggccctggctctgagcctgccactagcggctccgagactcctggcacatccgaaagcgctacacccgagagtggacccggcacctctaccgagcccagtgagggctccgcccctggaacaagcaccgagcccagcgaaggcagcgccccagggacctccacagagcccagtgaaggcagtgctcctggcaccagcaccgaaccaagcgagggctctgcacccgggacctccaccgagccaagcgaaggctctgcccctggcacttccaccgagcccagcgaaggcagcgcccctgggagccccgctggctctcccaccagcactgaggagggcacatctaccgaaccaagtgaaggctctgcaccaggtgcctcgagcccaccagtcttgaaacgccatcaagctgaaataactcgtactactcttcagtcagatcaagaggaaatcgattatgatgataccatatcagttgaaatgaagaaggaagattttgacatttatgatgaggatgaaaatcagagcccccgcagctttcaaaagaaaacacgacactattttattgctgcagtggagaggctctgggattatgggatgagtagctccccacatgttctaagaaacagggctcagagtggcagtgtccctcagttcaagaaagttgttttccaggaatttactgatggctcctttactcagcccttataccgtggagaactaaatgaacatttgggactcctggggccatatataagagcagaagttgaagataatatcatggtaactttcagaaatcaggcctctcgtccctattccttctattctagccttatttcttatgaggaagatcagaggcaaggagcagaacctagaaaaaactttgtcaagcctaatgaaaccaaaacttacttttggaaagtgcaacatcatatggcacccactaaagatgagtttgactgcaaagcctgggcttatttctctgatgttgacctggaaaaagatgtgcactcaggcctgattggaccccttctggtctgccacactaacacactgaaccctgctcatgggagacaagtgacagtacaggaatttgctctgtttttcaccatctttgatgagaccaaaagctggtacttcactgaaaatatggaaagaaactgcagggctccctgcaatatccagatggaagatcccggcgcgccatctccagccgggtccccaacttcgaccgaggaagggacctccgagtcagctaccccggagtccggtcctggcacctccaccgaaccatcggagggcagcgcccctgggagccctgccgggagccctacaagcaccgaagagggcaccagtacagagccaagtgaggggagcgcccctggtactagtactgaaccatccgaggggtcagctccaggcacgagtgagtccgctacccccgagagcggaccgggctcagagcccgccacgagtggcagtgaaactccaggctcagaacccgccactagtgggtcagagactccaggcagccctgccggatcccctacgtccaccgaggagggaacatctgagtccgcaacacccgaatccggtccaggcacctccacggaacctagtgaaggctcggcaccaggtgcctcgagcacttttaaagagaattatcgcttccatgcaatcaatggctacataatggatacactacctggcttagtaatggctcaggatcaaaggattcgatggtatctgctcagcatgggcagcaatgaaaacatccattctattcatttcagtggacatgtgttcactgtacgaaaaaaagaggagtataaaatggcactgtacaatctctatccaggtgtttttgagacagtggaaatgttaccatccaaagctggaatttggcgggtggaatgccttattggcgagcatctacatgctgggatgagcacactttttctggtgtacagcaataagtgtcagactcccctgggaatggcttctggacacattagagattttcagattacagcttcaggacaatatggacagtgggccccaaagctggccagacttcattattccggatcaatcaatgcctggagcaccaaggagcccttttcttggatcaaggtggatctgttggcaccaatgattattcacggcatcaagacccagggtgcccgtcagaagttctccagcctctacatctctcagtttatcatcatgtatagtcttgatgggaagaagtggcagacttatcgaggaaattccactggaaccttaatggtcttctttggcaatgtggattcatctgggataaaacacaatatttttaaccctccaattattgctcgatacatccgtttgcacccaactcattatagcattcgcagcactcttcgcatggagttgatgggctgtgatttaaatagttgcagcatgccattgggaatggagagtaaagcaatatcagatgcacagattactgcttcatcctactttaccaatatgtttgccacctggtctccttcaaaagctcgacttcacctccaagggaggagtaatgcctggagacctcaggtgaataatccaaaagagtggctgcaagtggacttccagaagacaatgaaagtcacaggagtaactactcagggagtaaaatctctgcttaccagcatgtatgtgaaggagttcctcatctccagcagtcaagatggccatcagtggactctcttttttcagaatggcaaagtaaaggtttttcagggaaatcaagactccttcacacctgtggtgaactctctagacccaccgttactgactcgctaccttcgaattcacccccagagttgggtgcaccagattgccctgaggatggaggttctgggctgcgaggcacaggacctctacggcgcgccaggtacctcagagtctgctacccccgagtcagggccaggatcagagccagccacctccgggtctgagacacccgggacttccgagagtgccacccctgagtccggacccgggtccgagcccgccacttccggctccgaaactcccggcacaagcgagagcgctaccccagagtcaggaccaggaacatctacagagccctctgaaggctccgctccagggtccccagccggcagtcccactagcaccgaggagggaacctctgaaagcgccacacccgaatcagggccagggtctgagcctgctaccagcggcagcgagacaccaggcacctctgagtccgccacaccagagtccggacccggatctcccgctgggagccccacctccactgaggagggatctcctgctggctctccaacatctactgaggaaggtacctcaaccgagccatccgagggatcagctcccggcacctcagagtcggcaaccccggagtctggacccggaacttccgaaagtgccacaccagagtccggtcccgggacttcagaatcagcaacacccgagtccggccctgggtctgaacccgccacaagtggtagtgagacaccaggatcagaacctgctacctcagggtcagagacacccggatctccggcaggctcaccaacctccactgaggagggcaccagcacagaaccaagcgagggctccgcacccggaacaagcactgaacccagtgagggttcagcacccggctctgagccggccacaagtggcagtgagacacccggcacttcagagagtgccacccccgagagtggcccaggcactagtaccgagccctctgaaggcagtgcgccagcctcgagcgaacaaaaactcatctcagaagaggatctgtcacctgcaaccggtcatcatcaccatcaccattga

SEQ ID NO: 1327 - protein, 2203 aa, synthetic construct
  REGION 1..2203: note = Description of Artificial Sequence: Synthetic polypeptide
ATRRYYLGAVELSWDYMQSDLGELPVDARFPPRVPKSFPFNTSVVYKKTLFVEFTDHLFNIAKPRPPWMGLLGPTIQAEVYDTVVITLKNMASHPVSLHAVGVSYWKASEGAEYDDQTSQREKEDDKVFPGGSHTYVWQVLKENGPMASDPLCLTYSYLSHVDLVKDLNSGLIGALLVCREGSLAKEKTQTLHKFILLFAVFDEGKSWHSETKNSLMQDRDAASARAWPKMHTVNGYVNRSLPGLIGCHRKSVYWHVIGMGTTPEVHSIFLEGHTFLVRNHRQASLEISPITFLTAQTLLMDLGQFLLFCHISSHQHDGMEAYVKVDSCPEEPQLRMKNNEEAEDYDDDLTDSEMDVVRFDDDNSPSFIQIRSVAKKHPKTWVHYIAAEEEDWDYAPLVLAPDGAPTSTEPSEGSAPGSPAGSPTSTEEGTSTEPSEGSAPGTSTEPSEGSAPGTSESATPESGPGTSTEPSEGSAPGTSESATPESGPGSEPATSGSETPGTSTEPSEGSAPGTSTEPSEGSAPGTSESATPESGPGTSESATPESGPGASSDRSYKSQYLNNGPQRIGRKYKKVRFMAYTDETFKTREAIQHESGILGPLLYGEVGDTLLIIFKNQASRPYNIYPHGITDVRPLYSRRLPKGVKHLKDFPILPGEIFKYKWTVTVEDGPTKSDPRCLTRYYSSFVNMERDLASGLIGPLLICYKESVDQRGNQIMSDKRNVILFSVFDENRSWYLTENIQRFLPNPAGVQLEDPEFQASNIMHSINGYVFDSLQLSVCLHEVAYWYILSIGAQTDFLSVFFSGYTFKHKMVYEDTLTLFPFSGETVFMSMENPGLWILGCHNSDFRNRGMTALLKVSSCDKNTGDYYEDSYEDISAYLLSKNNAIEPRSFSQNGAPSPAGSPTSTEEGTSESATPESGPGSEPATSGSETPGTSESATPESGPGTSTEPSEGSAPGTSTEPSEGSAPGTSTEPSEGSAPGTSTEPSEGSAPGTSTEPSEGSAPGTSTEPSEGSAPGSPAGSPTSTEEGTSTEPSEGSAPGASSPPVLKRHQAEITRTTLQSDQEEIDYDDTISVEMKKEDFDIYDEDENQSPRSFQKKTRHYFIAAVERLWDYGMSSSPHVLRNRAQSGSVPQFKKVVFQEFTDGSFTQPLYRGELNEHLGLLGPYIRAEVEDNIMVTFRNQASRPYSFYSSLISYEEDQRQGAEPRKNFVKPNETKTYFWKVQHHMAPTKDEFDCKAWAYFSDVDLEKDVHSGLIGPLLVCHTNTLNPAHGRQVTVQEFALFFTIFDETKSWYFTENMERNCRAPCNIQMEDPGAPSPAGSPTSTEEGTSESATPESGPGTSTEPSEGSAPGSPAGSPTSTEEGTSTEPSEGSAPGTSTEPSEGSAPGTSESATPESGPGSEPATSGSETPGSEPATSGSETPGSPAGSPTSTEEGTSESATPESGPGTSTEPSEGSAPGASSTFKENYRFHAINGYIMDTLPGLVMAQDQRIRWYLLSMGSNENIHSIHFSGHVFTVRKKEEYKMALYNLYPGVFETVEMLPSKAGIWRVECLIGEHLHAGMSTLFLVYSNKCQTPLGMASGHIRDFQITASGQYGQWAPKLARLHYSGSINAWSTKEPFSWIKVDLLAPMIIHGIKTQGARQKFSSLYISQFIIMYSLDGKKWQTYRGNSTGTLMVFFGNVDSSGIKHNIFNPPIIARYIRLHPTHYSIRSTLRMELMGCDLNSCSMPLGMESKAISDAQITASSYFTNMFATWSPSKARLHLQGRSNAWRPQVNNPKEWLQVDFQKTMKVTGVTTQGVKSLLTSMYVKEFLISSSQDGHQWTLFFQNGKVKVFQGNQDSFTPVVNSLDPPLLTRYLRIHPQSWVHQIALRMEVLGCEAQDLYGAPGTSESATPESGPGSEPATSGSETPGTSESATPESGPGSEPATSGSETPGTSESATPESGPGTSTEPSEGSAPGSPAGSPTSTEEGTSESATPESGPGSEPATSGSETPGTSESATPESGPGSPAGSPTSTEEGSPAGSPTSTEEGTSTEPSEGSAPGTSESATPESGPGTSESATPESGPGTSESATPESGPGSEPATSGSETPGSEPATSGSETPGSPAGSPTSTEEGTSTEPSEGSAPGTSTEPSEGSAPGSEPATSGSETPGTSESATPESGPGTSTEPSEGSAPASSEQKLISEEDLSPATGHHHHHH

SEQ ID NO: 1328 - DNA, 6612 bp, synthetic construct
  misc_feature 1..6612: note = Description of Artificial Sequence: Synthetic polynucleotide
  source 1..6612: mol_type = other DNA
gccaccagaagatactacctgggtgcagtggaactgtcatgggactatatgcaaagtgatctcggtgagctgcctgtggacgcaagatttcctcctagagtgccaaaatcttttccattcaacacctcagtcgtgtacaaaaagactctgtttgtagaattcacggatcaccttttcaacatcgctaagccaaggccaccctggatgggtctgctaggtcctaccatccaggctgaggtttatgatacagtggtcattacacttaagaacatggcttcccatcctgtcagtcttcatgctgttggtgtatcctactggaaagcttctgagggagctgaatatgatgatcagaccagtcaaagggagaaagaagatgataaagtcttccctggtggaagccatacatatgtctggcaggtcctgaaagagaatggtccaatggcctctgacccactgtgccttacctactcatatctttctcatgtggacctggtaaaagacttgaattcaggcctcattggagccctactagtatgtagagaagggagtctggccaaggaaaagacacagaccttgcacaaatttatactactttttgctgtatttgatgaagggaaaagttggcactcagaaacaaagaactccttgatgcaggatagggatgctgcatctgctcgggcctggcctaaaatgcacacagtcaatggttatgtaaacaggtctctgccaggtctgattggatgccacaggaaatcagtctattggcatgtgattggaatgggcaccactcctgaagtgcactcaatattcctcgaaggtcacacatttcttgtgaggaaccatcgccaggctagcttggaaatctcgccaataactttccttactgctcaaacactcttgatggaccttggacagtttctactgttttgtcatatctcttcccaccaacatgatggcatggaagcttatgtcaaagtagacagctgtccagaggaaccccaactacgaatgaaaaataatgaagaagcggaagactatgatgatgatcttactgattctgaaatggatgtggtcaggtttgatgatgacaactctccttcctttatccaaattcgctcagttgccaagaagcatcctaaaacttgggtacattacattgctgctgaagaggaggactgggactatgctcccttagtcctcgcccccgatggcgcgccaaccagtacggagccgtccgaggggagcgcaccaggaagcccggctgggagcccgacttctaccgaagagggtacatctaccgaaccaagtgaaggttcagcaccaggcacctcaacagaaccctctgagggctcggcgcctggtacaagtgagtccgccaccccagaatccgggcctgggacaagcacagaaccttcggaagggagtgcccctggaacatccgaatcggcaaccccagaatcagggccaggatctgagcccgcgacttcgggctccgagacgcctgggacatccaccgagccctccgaaggatcagccccaggcaccagcacggagccctctgagggaagcgcacctggtaccagcgaaagcgcaactcccgaatcaggtcccggtacgagcgagtcggcgaccccggagagcgggccaggtgcctcgagcgacagaagttataaaagtcaatatttgaacaatggccctcagcggattggtaggaagtacaaaaaagtccgatttatggcatacacagatgaaacctttaagactcgtgaagctattcagcatgaatcaggaatcttgggacctttactttatggggaagttggagacacactgttgattatatttaagaatcaagcaagcagaccatataacatctaccctcacggaatcactgatgtccgtcctttgtattcaaggagattaccaaaaggtgtaaaacatttgaaggattttccaattctgccaggagaaatattcaaatataaatggacagtgactgtagaagatgggccaactaaatcagatcctcggtgcctgacccgctattactctagtttcgttaatatggagagagatctagcttcaggactcattggccctctcctcatctgctacaaagaatctgtagatcaaagaggaaaccagataatgtcagacaagaggaatgtcatcctgttttctgtatttgatgagaaccgaagctggtacctcacagagaatatacaacgctttctccccaatccagctggagtgcagcttgaggatccagagttccaagcctccaacatcatgcacagcatcaatggctatgtttttgatagtttgcagttgtcagtttgtttgcatgaggtggcatactggtacattctaagcattggagcacagactgacttcctttctgtcttcttctctggatataccttcaaacacaaaatggtctatgaagacacactcaccctattcccattctcaggagaaactgtcttcatgtcgatggaaaacccaggtctatggattctggggtgccacaactcagactttcggaacagaggcatgaccgccttactgaaggtttctagttgtgacaagaacactggtgattattacgaggacagttatgaagatatttcagcatacttgctgagtaaaaacaatgccattgaaccaagaagcttctctcaaaacggcgcgccaagtcccgctggaagcccaactagcaccgaagaggggacctcagagtccgccacccccgagtccggccctggctctgagcctgccactagcggctccgagactcctggcacatccgaaagcgctacacccgagagtggacccggcacctctaccgagcccagtgagggctccgcccctggaacaagcaccgagcccagcgaaggcagcgccccagggacctccacagagcccagtgaaggcagtgctcctggcaccagcaccgaaccaagcgagggctctgcacccgggacctccaccgagccaagcgaaggctctgcccctggcacttccaccgagcccagcgaaggcagcgcccctgggagccccgctggctctcccaccagcactgaggagggcacatctaccgaaccaagtgaaggctctgcaccaggtgcctcgagcccaccagtcttgaaacgccatcaagctgaaataactcgtactactcttcagtcagatcaagaggaaatcgattatgatgataccatatcagttgaaatgaagaaggaagattttgacatttatgatgaggatgaaaatcagagcccccgcagctttcaaaagaaaacacgacactattttattgctgcagtggagaggctctgggattatgggatgagtagctccccacatgttctaagaaacagggctcagagtggcagtgtccctcagttcaagaaagttgttttccaggaatttactgatggctcctttactcagcccttataccgtggagaactaaatgaacatttgggactcctggggccatatataagagcagaagttgaagataatatcatggtaactttcagaaatcaggcctctcgtccctattccttctattctagccttatttcttatgaggaagatcagaggcaaggagcagaacctagaaaaaactttgtcaagcctaatgaaaccaaaacttacttttggaaagtgcaacatcatatggcacccactaaagatgagtttgactgcaaagcctgggcttatttctctgatgttgacctggaaaaagatgtgcactcaggcctgattggaccccttctggtctgccacactaacacactgaaccctgctcatgggagacaagtgacagtacaggaatttgctctgtttttcaccatctttgatgagaccaaaagctggtacttcactgaaaatatggaaagaaactgcagggctccctgcaatatccagatggaagatcccggcgcgccatctccagccgggtccccaacttcgaccgaggaagggacctccgagtcagctaccccggagtccggtcctggcacctccaccgaaccatcggagggcagcgcccctgggagccctgccgggagccctacaagcaccgaagagggcaccagtacagagccaagtgaggggagcgcccctggtactagtactgaaccatccgaggggtcagctccaggcacgagtgagtccgctacccccgagagcggaccgggctcagagcccgccacgagtggcagtgaaactccaggctcagaacccgccactagtgggtcagagactccaggcagccctgccggatcccctacgtccaccgaggagggaacatctgagtccgcaacacccgaatccggtccaggcacctccacggaacctagtgaaggctcggcaccaggtgcctcgagcacttttaaagagaattatcgcttccatgcaatcaatggctacataatggatacactacctggcttagtaatggctcaggatcaaaggattcgatggtatctgctcagcatgggcagcaatgaaaacatccattctattcatttcagtggacatgtgttcactgtacgaaaaaaagaggagtataaaatggcactgtacaatctctatccaggtgtttttgagacagtggaaatgttaccatccaaagctggaatttggcgggtggaatgccttattggcgagcatctacatgctgggatgagcacactttttctggtgtacagcaataagtgtcagactcccctgggaatggcttctggacacattagagattttcagattacagcttcaggacaatatggacagtgggccccaaagctggccagacttcattattccggatcaatcaatgcctggagcaccaaggagcccttttcttggatcaaggtggatctgttggcaccaatgattattcacggcatcaagacccagggtgcccgtcagaagttctccagcctctacatctctcagtttatcatcatgtatagtcttgatgggaagaagtggcagacttatcgaggaaattccactggaaccttaatggtcttctttggcaatgtggattcatctgggataaaacacaatatttttaaccctccaattattgctcgatacatccgtttgcacccaactcattatagcattcgcagcactcttcgcatggagttgatgggctgtgatttaaatagttgcagcatgccattgggaatggagagtaaagcaatatcagatgcacagattactgcttcatcctactttaccaatatgtttgccacctggtctccttcaaaagctcgacttcacctccaagggaggagtaatgcctggagacctcaggtgaataatccaaaagagtggctgcaagtggacttccagaagacaatgaaagtcacaggagtaactactcagggagtaaaatctctgcttaccagcatgtatgtgaaggagttcctcatctccagcagtcaagatggccatcagtggactctcttttttcagaatggcaaagtaaaggtttttcagggaaatcaagactccttcacacctgtggtgaactctctagacccaccgttactgactcgctaccttcgaattcacccccagagttgggtgcaccagattgccctgaggatggaggttctgggctgcgaggcacaggacctctacggcgcgccaggtacctcagagtctgctacccccgagtcagggccaggatcagagccagccacctccgggtctgagacacccgggacttccgagagtgccacccctgagtccggacccgggtccgagcccgccacttccggctccgaaactcccggcacaagcgagagcgctaccccagagtcaggaccaggaacatctacagagccctctgaaggctccgctccagggtccccagccggcagtcccactagcaccgaggagggaacctctgaaagcgccacacccgaatcagggccagggtctgagcctgctaccagcggcagcgagacaccaggcacctctgagtccgccacaccagagtccggacccggatctcccgctgggagccccacctccactgaggagggatctcctgctggctctccaacatctactgaggaaggtacctcaaccgagccatccgagggatcagctcccggcacctcagagtcggcaaccccggagtctggacccggaacttccgaaagtgccacaccagagtccggtcccgggacttcagaatcagcaacacccgagtccggccctgggtctgaacccgccacaagtggtagtgagacaccaggatcagaacctgctacctcagggtcagagacacccggatctccggcaggctcaccaacctccactgaggagggcaccagcacagaaccaagcgagggctccgcacccggaacaagcactgaacccagtgagggttcagcacccggctctgagccggccacaagtggcagtgagacacccggcacttcagagagtgccacccccgagagtggcccaggcactagtaccgagccctctgaaggcagtgcgccagcctcgagcgaacaaaaactcatctcagaagaggatctgtcacctgcaaccggtcatcatcaccatcaccattga

SEQ ID NO: 1329 - protein, 2203 aa, synthetic construct
  REGION 1..2203: note = Description of Artificial Sequence: Synthetic polypeptide
ATRRYYLGAVELSWDYMQSDLGELPVDARFPPRVPKSFPFNTSVVYKKTLFVEFTDHLFNIAKPRPPWMGLLGPTIQAEVYDTVVITLKNMASHPVSLHAVGVSYWKASEGAEYDDQTSQREKEDDKVFPGGSHTYVWQVLKENGPMASDPLCLTYSYLSHVDLVKDLNSGLIGALLVCREGSLAKEKTQTLHKFILLFAVFDEGKSWHSETKNSLMQDRDAASARAWPKMHTVNGYVNRSLPGLIGCHRKSVYWHVIGMGTTPEVHSIFLEGHTFLVRNHRQASLEISPITFLTAQTLLMDLGQFLLFCHISSHQHDGMEAYVKVDSCPEEPQLRMKNNEEAEDYDDDLTDSEMDVVRFDDDNSPSFIQIRSVAKKHPKTWVHYIAAEEEDWDYAPLVLAPDGAPGASPGTSSTGSPGSSPSASTGTGPGSSPSASTGTGPGTPGSGTASSSPGSSTPSGATGSPGSSPSASTGTGPGASPGTSSTGSPGTPGSGTASSSPGSSTPSGATGSPGTPGSGTASSSPGASPGTSSTGSPGASPGTSSTGSPASSDRSYKSQYLNNGPQRIGRKYKKVRFMAYTDETFKTREAIQHESGILGPLLYGEVGDTLLIIFKNQASRPYNIYPHGITDVRPLYSRRLPKGVKHLKDFPILPGEIFKYKWTVTVEDGPTKSDPRCLTRYYSSFVNMERDLASGLIGPLLICYKESVDQRGNQIMSDKRNVILFSVFDENRSWYLTENIQRFLPNPAGVQLEDPEFQASNIMHSINGYVFDSLQLSVCLHEVAYWYILSIGAQTDFLSVFFSGYTFKHKMVYEDTLTLFPFSGETVFMSMENPGLWILGCHNSDFRNRGMTALLKVSSCDKNTGDYYEDSYEDISAYLLSKNNAIEPRSFSQNGAPSPAGSPTSTEEGTSESATPESGPGSEPATSGSETPGTSESATPESGPGTSTEPSEGSAPGTSTEPSEGSAPGTSTEPSEGSAPGTSTEPSEGSAPGTSTEPSEGSAPGTSTEPSEGSAPGSPAGSPTSTEEGTSTEPSEGSAPGASSPPVLKRHQAEITRTTLQSDQEEIDYDDTISVEMKKEDFDIYDEDENQSPRSFQKKTRHYFIAAVERLWDYGMSSSPHVLRNRAQSGSVPQFKKVVFQEFTDGSFTQPLYRGELNEHLGLLGPYIRAEVEDNIMVTFRNQASRPYSFYSSLISYEEDQRQGAEPRKNFVKPNETKTYFWKVQHHMAPTKDEFDCKAWAYFSDVDLEKDVHSGLIGPLLVCHTNTLNPAHGRQVTVQEFALFFTIFDETKSWYFTENMERNCRAPCNIQMEDPGAPSPAGSPTSTEEGTSESATPESGPGTSTEPSEGSAPGSPAGSPTSTEEGTSTEPSEGSAPGTSTEPSEGSAPGTSESATPESGPGSEPATSGSETPGSEPATSGSETPGSPAGSPTSTEEGTSESATPESGPGTSTEPSEGSAPGASSTFKENYRFHAINGYIMDTLPGLVMAQDQRIRWYLLSMGSNENIHSIHFSGHVFTVRKKEEYKMALYNLYPGVFETVEMLPSKAGIWRVECLIGEHLHAGMSTLFLVYSNKCQTPLGMASGHIRDFQITASGQYGQWAPKLARLHYSGSINAWSTKEPFSWIKVDLLAPMIIHGIKTQGARQKFSSLYISQFIIMYSLDGKKWQTYRGNSTGTLMVFFGNVDSSGIKHNIFNPPIIARYIRLHPTHYSIRSTLRMELMGCDLNSCSMPLGMESKAISDAQITASSYFTNMFATWSPSKARLHLQGRSNAWRPQVNNPKEWLQVDFQKTMKVTGVTTQGVKSLLTSMYVKEFLISSSQDGHQWTLFFQNGKVKVFQGNQDSFTPVVNSLDPPLLTRYLRIHPQSWVHQIALRMEVLGCEAQDLYGAPGTSESATPESGPGSEPATSGSETPGTSESATPESGPGSEPATSGSETPGTSESATPESGPGTSTEPSEGSAPGSPAGSPTSTEEGTSESATPESGPGSEPATSGSETPGTSESATPESGPGSPAGSPTSTEEGSPAGSPTSTEEGTSTEPSEGSAPGTSESATPESGPGTSESATPESGPGTSESATPESGPGSEPATSGSETPGSEPATSGSETPGSPAGSPTSTEEGTSTEPSEGSAPGTSTEPSEGSAPGSEPATSGSETPGTSESATPESGPGTSTEPSEGSAPASSEQKLISEEDLSPATGHHHHHH

SEQ ID NO: 1330 - DNA, 6612 bp, synthetic construct
  misc_feature 1..6612: note = Description of Artificial Sequence: Synthetic polynucleotide
  source 1..6612: mol_type = other DNA
gccaccagaagatactacctgggtgcagtggaactgtcatgggactatatgcaaagtgatctcggtgagctgcctgtggacgcaagatttcctcctagagtgccaaaatcttttccattcaacacctcagtcgtgtacaaaaagactctgtttgtagaattcacggatcaccttttcaacatcgctaagccaaggccaccctggatgggtctgctaggtcctaccatccaggctgaggtttatgatacagtggtcattacacttaagaacatggcttcccatcctgtcagtcttcatgctgttggtgtatcctactggaaagcttctgagggagctgaatatgatgatcagaccagtcaaagggagaaagaagatgataaagtcttccctggtggaagccatacatatgtctggcaggtcctgaaagagaatggtccaatggcctctgacccactgtgccttacctactcatatctttctcatgtggacctggtaaaagacttgaattcaggcctcattggagccctactagtatgtagagaagggagtctggccaaggaaaagacacagaccttgcacaaatttatactactttttgctgtatttgatgaagggaaaagttggcactcagaaacaaagaactccttgatgcaggatagggatgctgcatctgctcgggcctggcctaaaatgcacacagtcaatggttatgtaaacaggtctctgccaggtctgattggatgccacaggaaatcagtctattggcatgtgattggaatgggcaccactcctgaagtgcactcaatattcctcgaaggtcacacatttcttgtgaggaaccatcgccaggctagcttggaaatctcgccaataactttccttactgctcaaacactcttgatggaccttggacagtttctactgttttgtcatatctcttcccaccaacatgatggcatggaagcttatgtcaaagtagacagctgtccagaggaaccccaactacgaatgaaaaataatgaagaagcggaagactatgatgatgatcttactgattctgaaatggatgtggtcaggtttgatgatgacaactctccttcctttatccaaattcgctcagttgccaagaagcatcctaaaacttgggtacattacattgctgctgaagaggaggactgggactatgctcccttagtcctcgcccccgatggcgcgccaggtgcctcgccgggaacatcatcaactggttcacccgggtcatccccctcggcctcaaccgggacgggtcccggctcatcccccagcgccagcactggaacaggtcctggcactcctggttccggtacggcatcgtcatccccgggaagctcaacaccgtccggagcgacaggatcacctggctcgtcaccttcggcgtcaactggaacggggccaggggcctcacccggaacgtcctcgactgggtcgcctggtacgccgggatcaggaacggcctcatcctcgcctgggtcctcaacgccctcgggtgcgactggttcgccgggaactcctggctcggggacggcctcgtcgtcgcctggggcatcaccggggacgagctccacggggtcccctggagcgtcaccggggacctcctcgacaggtagcccggcctcgagcgacagaagttataaaagtcaatatttgaacaatggccctcagcggattggtaggaagtacaaaaaagtccgatttatggcatacacagatgaaacctttaagactcgtgaagctattcagcatgaatcaggaatcttgggacctttactttatggggaagttggagacacactgttgattatatttaagaatcaagcaagcagaccatataacatctaccctcacggaatcactgatgtccgtcctttgtattcaaggagattaccaaaaggtgtaaaacatttgaaggattttccaattctgccaggagaaatattcaaatataaatggacagtgactgtagaagatgggccaactaaatcagatcctcggtgcctgacccgctattactctagtttcgttaatatggagagagatctagcttcaggactcattggccctctcctcatctgctacaaagaatctgtagatcaaagaggaaaccagataatgtcagacaagaggaatgtcatcctgttttctgtatttgatgagaaccgaagctggtacctcacagagaatatacaacgctttctccccaatccagctggagtgcagcttgaggatccagagttccaagcctccaacatcatgcacagcatcaatggctatgtttttgatagtttgcagttgtcagtttgtttgcatgaggtggcatactggtacattctaagcattggagcacagactgacttcctttctgtcttcttctctggatataccttcaaacacaaaatggtctatgaagacacactcaccctattcccattctcaggagaaactgtcttcatgtcgatggaaaacccaggtctatggattctggggtgccacaactcagactttcggaacagaggcatgaccgccttactgaaggtttctagttgtgacaagaacactggtgattattacgaggacagttatgaagatatttcagcatacttgctgagtaaaaacaatgccattgaaccaagaagcttctctcaaaacggcgcgccaagtcccgctggaagcccaactagcaccgaagaggggacctcagagtccgccacccccgagtccggccctggctctgagcctgccactagcggctccgagactcctggcacatccgaaagcgctacacccgagagtggacccggcacctctaccgagcccagtgagggctccgcccctggaacaagcaccgagcccagcgaaggcagcgccccagggacctccacagagcccagtgaaggcagtgctcctggcaccagcaccgaaccaagcgagggctctgcacccgggacctccaccgagccaagcgaaggctctgcccctggcacttccaccgagcccagcgaaggcagcgcccctgggagccccgctggctctcccaccagcactgaggagggcacatctaccgaaccaagtgaaggctctgcaccaggtgcctcgagcccaccagtcttgaaacgccatcaagctgaaataactcgtactactcttcagtcagatcaagaggaaatcgattatgatgataccatatcagttgaaatgaagaaggaagattttgacatttatgatgaggatgaaaatcagagcccccgcagctttcaaaagaaaacacgacactattttattgctgcagtggagaggctctgggattatgggatgagtagctccccacatgttctaagaaacagggctcagagtggcagtgtccctcagttcaagaaagttgttttccaggaatttactgatggctcctttactcagcccttataccgtggagaactaaatgaacatttgggactcctggggccatatataagagcagaagttgaagataatatcatggtaactttcagaaatcaggcctctcgtccctattccttctattctagccttatttcttatgaggaagatcagaggcaaggagcagaacctagaaaaaactttgtcaagcctaatgaaaccaaaacttacttttggaaagtgcaacatcatatggcacccactaaagatgagtttgactgcaaagcctgggcttatttctctgatgttgacctggaaaaagatgtgcactcaggcctgattggaccccttctggtctgccacactaacacactgaaccctgctcatgggagacaagtgacagtacaggaatttgctctgtttttcaccatctttgatgagaccaaaagctggtacttcactgaaaatatggaaagaaactgcagggctccctgcaatatccagatggaagatcccggcgcgccatctccagccgggtccccaacttcgaccgaggaagggacctccgagtcagctaccccggagtccggtcctggcacctccaccgaaccatcggagggcagcgcccctgggagccctgccgggagccctacaagcaccgaagagggcaccagtacagagccaagtgaggggagcgcccctggtactagtactgaaccatccgaggggtcagctccaggcacgagtgagtccgctacccccgagagcggaccgggctcagagcccgccacgagtggcagtgaaactccaggctcagaacccgccactagtgggtcagagactccaggcagccctgccggatcccctacgtccaccgaggagggaacatctgagtccgcaacacccgaatccggtccaggcacctccacggaacctagtgaaggctcggcaccaggtgcctcgagcacttttaaagagaattatcgcttccatgcaatcaatggctacataatggatacactacctggcttagtaatggctcaggatcaaaggattcgatggtatctgctcagcatgggcagcaatgaaaacatccattctattcatttcagtggacatgtgttcactgtacgaaaaaaagaggagtataaaatggcactgtacaatctctatccaggtgtttttgagacagtggaaatgttaccatccaaagctggaatttggcgggtggaatgccttattggcgagcatctacatgctgggatgagcacactttttctggtgtacagcaataagtgtcagactcccctgggaatggcttctggacacattagagattttcagattacagcttcaggacaatatggacagtgggccccaaagctggccagacttcattattccggatcaatcaatgcctggagcaccaaggagcccttttcttggatcaaggtggatctgttggcaccaatgattattcacggcatcaagacccagggtgcccgtcagaagttctccagcctctacatctctcagtttatcatcatgtatagtcttgatgggaagaagtggcagacttatcgaggaaattccactggaaccttaatggtcttctttggcaatgtggattcatctgggataaaacacaatatttttaaccctccaattattgctcgatacatccgtttgcacccaactcattatagcattcgcagcactcttcgcatggagttgatgggctgtgatttaaatagttgcagcatgccattgggaatggagagtaaagcaatatcagatgcacagattactgcttcatcctactttaccaatatgtttgccacctggtctccttcaaaagctcgacttcacctccaagggaggagtaatgcctggagacctcaggtgaataatccaaaagagtggctgcaagtggacttccagaagacaatgaaagtcacaggagtaactactcagggagtaaaatctctgcttaccagcatgtatgtgaaggagttcctcatctccagcagtcaagatggccatcagtggactctcttttttcagaatggcaaagtaaaggtttttcagggaaatcaagactccttcacacctgtggtgaactctctagacccaccgttactgactcgctaccttcgaattcacccccagagttgggtgcaccagattgccctgaggatggaggttctgggctgcgaggcacaggacctctacggcgcgccaggtacctcagagtctgctacccccgagtcagggccaggatcagagccagccacctccgggtctgagacacccgggacttccgagagtgccacccctgagtccggacccgggtccgagcccgccacttccggctccgaaactcccggcacaagcgagagcgctaccccagagtcaggaccaggaacatctacagagccctctgaaggctccgctccagggtccccagccggcagtcccactagcaccgaggagggaacctctgaaagcgccacacccgaatcagggccagggtctgagcctgctaccagcggcagcgagacaccaggcacctctgagtccgccacaccagagtccggacccggatctcccgctgggagccccacctccactgaggagggatctcctgctggctctccaacatctactgaggaaggtacctcaaccgagccatccgagggatcagctcccggcacctcagagtcggcaaccccggagtctggacccggaacttccgaaagtgccacaccagagtccggtcccgggacttcagaatcagcaacacccgagtccggccctgggtctgaacccgccacaagtggtagtgagacaccaggatcagaacctgctacctcagggtcagagacacccggatctccggcaggctcaccaacctccactgaggagggcaccagcacagaaccaagcgagggctccgcacccggaacaagcactgaacccagtgagggttcagcacccggctctgagccggccacaagtggcagtgagacacccggcacttcagagagtgccacccccgagagtggcccaggcactagtaccgagccctctgaaggcagtgcgccagcctcgagcgaacaaaaactcatctcagaagaggatctgtcacctgcaaccggtcatcatcaccatcaccattga

SEQ ID NO: 1331 - protein, 2203 aa, synthetic construct
  REGION 1..2203: note = Description of Artificial Sequence: Synthetic polypeptide
ATRRYYLGAVELSWDYMQSDLGELPVDARFPPRVPKSFPFNTSVVYKKTLFVEFTDHLFNIAKPRPPWMGLLGPTIQAEVYDTVVITLKNMASHPVSLHAVGVSYWKASEGAEYDDQTSQREKEDDKVFPGGSHTYVWQVLKENGPMASDPLCLTYSYLSHVDLVKDLNSGLIGALLVCREGSLAKEKTQTLHKFILLFAVFDEGKSWHSETKNSLMQDRDAASARAWPKMHTVNGYVNRSLPGLIGCHRKSVYWHVIGMGTTPEVHSIFLEGHTFLVRNHRQASLEISPITFLTAQTLLMDLGQFLLFCHISSHQHDGMEAYVKVDSCPEEPQLRMKNNEEAEDYDDDLTDSEMDVVRFDDDNSPSFIQIRSVAKKHPKTWVHYIAAEEEDWDYAPLVLAPDGAPTSTEPSEGSAPGSPAGSPTSTEEGTSTEPSEGSAPGTSTEPSEGSAPGTSESATPESGPGTSTEPSEGSAPGTSESATPESGPGSEPATSGSETPGTSTEPSEGSAPGTSTEPSEGSAPGTSESATPESGPGTSESATPESGPGASSDRSYKSQYLNNGPQRIGRKYKKVRFMAYTDETFKTREAIQHESGILGPLLYGEVGDTLLIIFKNQASRPYNIYPHGITDVRPLYSRRLPKGVKHLKDFPILPGEIFKYKWTVTVEDGPTKSDPRCLTRYYSSFVNMERDLASGLIGPLLICYKESVDQRGNQIMSDKRNVILFSVFDENRSWYLTENIQRFLPNPAGVQLEDPEFQASNIMHSINGYVFDSLQLSVCLHEVAYWYILSIGAQTDFLSVFFSGYTFKHKMVYEDTLTLFPFSGETVFMSMENPGLWILGCHNSDFRNRGMTALLKVSSCDKNTGDYYEDSYEDISAYLLSKNNAIEPRSFSQNGAPSPAGSPTSTEEGTSESATPESGPGSEPATSGSETPGTSESATPESGPGTSTEPSEGSAPGTSTEPSEGSAPGTSTEPSEGSAPGTSTEPSEGSAPGTSTEPSEGSAPGTSTEPSEGSAPGSPAGSPTSTEEGTSTEPSEGSAPGASSPPVLKRHQAEITRTTLQSDQEEIDYDDTISVEMKKEDFDIYDEDENQSPRSFQKKTRHYFIAAVERLWDYGMSSSPHVLRNRAQSGSVPQFKKVVFQEFTDGSFTQPLYRGELNEHLGLLGPYIRAEVEDNIMVTFRNQASRPYSFYSSLISYEEDQRQGAEPRKNFVKPNETKTYFWKVQHHMAPTKDEFDCKAWAYFSDVDLEKDVHSGLIGPLLVCHTNTLNPAHGRQVTVQEFALFFTIFDETKSWYFTENMERNCRAPCNIQMEDPGAPGTPGSGTASSSPGASPGTSSTGSPGASPGTSSTGSPGASPGTSSTGSPGSSPSASTGTGPGTPGSGTASSSPGASPGTSSTGSPGASPGTSSTGSPGASPGTSSTGSPGSSTPSGATGSPGSSTPSGATGSPGASPGTSSTGSPASSTFKENYRFHAINGYIMDTLPGLVMAQDQRIRWYLLSMGSNENIHSIHFSGHVFTVRKKEEYKMALYNLYPGVFETVEMLPSKAGIWRVECLIGEHLHAGMSTLFLVYSNKCQTPLGMASGHIRDFQITASGQYGQWAPKLARLHYSGSINAWSTKEPFSWIKVDLLAPMIIHGIKTQGARQKFSSLYISQFIIMYSLDGKKWQTYRGNSTGTLMVFFGNVDSSGIKHNIFNPPIIARYIRLHPTHYSIRSTLRMELMGCDLNSCSMPLGMESKAISDAQITASSYFTNMFATWSPSKARLHLQGRSNAWRPQVNNPKEWLQVDFQKTMKVTGVTTQGVKSLLTSMYVKEFLISSSQDGHQWTLFFQNGKVKVFQGNQDSFTPVVNSLDPPLLTRYLRIHPQSWVHQIALRMEVLGCEAQDLYGAPGTSESATPESGPGSEPATSGSETPGTSESATPESGPGSEPATSGSETPGTSESATPESGPGTSTEPSEGSAPGSPAGSPTSTEEGTSESATPESGPGSEPATSGSETPGTSESATPESGPGSPAGSPTSTEEGSPAGSPTSTEEGTSTEPSEGSAPGTSESATPESGPGTSESATPESGPGTSESATPESGPGSEPATSGSETPGSEPATSGSETPGSPAGSPTSTEEGTSTEPSEGSAPGTSTEPSEGSAPGSEPATSGSETPGTSESATPESGPGTSTEPSEGSAPASSEQKLISEEDLSPATGHHHHHH

SEQ ID NO: 1332 - DNA, 6612 bp, synthetic construct
  misc_feature 1..6612: note = Description of Artificial Sequence: Synthetic polynucleotide
  source 1..6612: mol_type = other DNA
gccaccagaagatactacctgggtgcagtggaactgtcatgggactatatgcaaagtgatctcggtgagctgcctgtggacgcaagatttcctcctagagtgccaaaatcttttccattcaacacctcagtcgtgtacaaaaagactctgtttgtagaattcacggatcaccttttcaacatcgctaagccaaggccaccctggatgggtctgctaggtcctaccatccaggctgaggtttatgatacagtggtcattacacttaagaacatggcttcccatcctgtcagtcttcatgctgttggtgtatcctactggaaagcttctgagggagctgaatatgatgatcagaccagtcaaagggagaaagaagatgataaagtcttccctggtggaagccatacatatgtctggcaggtcctgaaagagaatggtccaatggcctctgacccactgtgccttacctactcatatctttctcatgtggacctggtaaaagacttgaattcaggcctcattggagccctactagtatgtagagaagggagtctggccaaggaaaagacacagaccttgcacaaatttatactactttttgctgtatttgatgaagggaaaagttggcactcagaaacaaagaactccttgatgcaggatagggatgctgcatctgctcgggcctggcctaaaatgcacacagtcaatggttatgtaaacaggtctctgccaggtctgattggatgccacaggaaatcagtctattggcatgtgattggaatgggcaccactcctgaagtgcactcaatattcctcgaaggtcacacatttcttgtgaggaaccatcgccaggctagcttggaaatctcgccaataactttccttactgctcaaacactcttgatggaccttggacagtttctactgttttgtcatatctcttcccaccaacatgatggcatggaagcttatgtcaaagtagacagctgtccagaggaaccccaactacgaatgaaaaataatgaagaagcggaagactatgatgatgatcttactgattctgaaatggatgtggtcaggtttgatgatgacaactctccttcctttatccaaattcgctcagttgccaagaagcatcctaaaacttgggtacattacattgctgctgaagaggaggactgggactatgctcccttagtcctcgcccccgatggcgcgccaaccagtacggagccgtccgaggggagcgcaccaggaagcccggctgggagcccgacttctaccgaagagggtacatctaccgaaccaagtgaaggttcagcaccaggcacctcaacagaaccctctgagggctcggcgcctggtacaagtgagtccgccaccccagaatccgggcctgggacaagcacagaaccttcggaagggagtgcccctggaacatccgaatcggcaaccccagaatcagggccaggatctgagcccgcgacttcgggctccgagacgcctgggacatccaccgagccctccgaaggatcagccccaggcaccagcacggagccctctgagggaagcgcacctggtaccagcgaaagcgcaactcccgaatcaggtcccggtacgagcgagtcggcgaccccggagagcgggccaggtgcctcgagcgacagaagttataaaagtcaatatttgaacaatggccctcagcggattggtaggaagtacaaaaaagtccgatttatggcatacacagatgaaacctttaagactcgtgaagctattcagcatgaatcaggaatcttgggacctttactttatggggaagttggagacacactgttgattatatttaagaatcaagcaagcagaccatataacatctaccctcacggaatcactgatgtccgtcctttgtattcaaggagattaccaaaaggtgtaaaacatttgaaggattttccaattctgccaggagaaatattcaaatataaatggacagtgactgtagaagatgggccaactaaatcagatcctcggtgcctgacccgctattactctagtttcgttaatatggagagagatctagcttcaggactcattggccctctcctcatctgctacaaagaatctgtagatcaaagaggaaaccagataatgtcagacaagaggaatgtcatcctgttttctgtatttgatgagaaccgaagctggtacctcacagagaatatacaacgctttctccccaatccagctggagtgcagcttgaggatccagagttccaagcctccaacatcatgcacagcatcaatggctatgtttttgatagtttgcagttgtcagtttgtttgcatgaggtggcatactggtacattctaagcattggagcacagactgacttcctttctgtcttcttctctggatataccttcaaacacaaaatggtctatgaagacacactcaccctattcccattctcaggagaaactgtcttcatgtcgatggaaaacccaggtctatggattctggggtgccacaactcagactttcggaacagaggcatgaccgccttactgaaggtttctagttgtgacaagaacactggtgattattacgaggacagttatgaagatatttcagcatacttgctgagtaaaaacaatgccattgaaccaagaagcttctctcaaaacggcgcgccaagtcccgctggaagcccaactagcaccgaagaggggacctcagagtccgccacccccgagtccggccctggctctgagcctgccactagcggctccgagactcctggcacatccgaaagcgctacacccgagagtggacccggcacctctaccgagcccagtgagggctccgcccctggaacaagcaccgagcccagcgaaggcagcgccccagggacctccacagagcccagtgaaggcagtgctcctggcaccagcaccgaaccaagcgagggctctgcacccgggacctccaccgagccaagcgaaggctctgcccctggcacttccaccgagcccagcgaaggcagcgcccctgggagccccgctggctctcccaccagcactgaggagggcacatctaccgaaccaagtgaaggctctgcaccaggtgcctcgagcccaccagtcttgaaacgccatcaagctgaaataactcgtactactcttcagtcagatcaagaggaaatcgattatgatgataccatatcagttgaaatgaagaaggaagattttgacatttatgatgaggatgaaaatcagagcccccgcagctttcaaaagaaaacacgacactattttattgctgcagtggagaggctctgggattatgggatgagtagctccccacatgttctaagaaacagggctcagagtggcagtgtccctcagttcaagaaagttgttttccaggaatttactgatggctcctttactcagcccttataccgtggagaactaaatgaacatttgggactcctggggccatatataagagcagaagttgaagataatatcatggtaactttcagaaatcaggcctctcgtccctattccttctattctagccttatttcttatgaggaagatcagaggcaaggagcagaacctagaaaaaactttgtcaagcctaatgaaaccaaaacttacttttggaaagtgcaacatcatatggcacccactaaagatgagtttgactgcaaagcctgggcttatttctctgatgttgacctggaaaaagatgtgcactcaggcctgattggaccccttctggtctgccacactaacacactgaaccctgctcatgggagacaagtgacagtacaggaatttgctctgtttttcaccatctttgatgagaccaaaagctggtacttcactgaaaatatggaaagaaactgcagggctccctgcaatatccagatggaagatcccggcgcgccaggtacacccggatcgggtacagcgtcatcgagccccggtgcgtcacctggtacgtcgagcacggggtcgccaggggcgtcccctgggacgtcctcaacaggctcgcccggtgcgtcacccggcacgtcgtccacgggttcacctggtagctccccttccgcgtccactggcaccgggcctggaactccggggagcggcacagcgagctcgtcgccgggagcatcgcctgggacatcgagcaccgggtcgccaggagcatcgcccggaacatccagcacaggaagccccggcgcgtcgcccgggacatcaagcacaggttccccgggatcgagcacgccgtccggagccactggatcaccagggagctcgacaccttccggcgcaacgggatcgcccggagccagcccgggtacgtcaagcactggctcccctgcctcgagcacttttaaagagaattatcgcttccatgcaatcaatggctacataatggatacactacctggcttagtaatggctcaggatcaaaggattcgatggtatctgctcagcatgggcagcaatgaaaacatccattctattcatttcagtggacatgtgttcactgtacgaaaaaaagaggagtataaaatggcactgtacaatctctatccaggtgtttttgagacagtggaaatgttaccatccaaagctggaatttggcgggtggaatgccttattggcgagcatctacatgctgggatgagcacactttttctggtgtacagcaataagtgtcagactcccctgggaatggcttctggacacattagagattttcagattacagcttcaggacaatatggacagtgggccccaaagctggccagacttcattattccggatcaatcaatgcctggagcaccaaggagcccttttcttggatcaaggtggatctgttggcaccaatgattattcacggcatcaagacccagggtgcccgtcagaagttctccagcctctacatctctcagtttatcatcatgtatagtcttgatgggaagaagtggcagacttatcgaggaaattccactggaaccttaatggtcttctttggcaatgtggattcatctgggataaaacacaatatttttaaccctccaattattgctcgatacatccgtttgcacccaactcattatagcattcgcagcactcttcgcatggagttgatgggctgtgatttaaatagttgcagcatgccattgggaatggagagtaaagcaatatcagatgcacagattactgcttcatcctactttaccaatatgtttgccacctggtctccttcaaaagctcgacttcacctccaagggaggagtaatgcctggagacctcaggtgaataatccaaaagagtggctgcaagtggacttccagaagacaatgaaagtcacaggagtaactactcagggagtaaaatctctgcttaccagcatgtatgtgaaggagttcctcatctccagcagtcaagatggccatcagtggactctcttttttcagaatggcaaagtaaaggtttttcagggaaatcaagactccttcacacctgtggtgaactctctagacccaccgttactgactcgctaccttcgaattcacccccagagttgggtgcaccagattgccctgaggatggaggttctgggctgcgaggcacaggacctctacggcgcgccaggtacctcagagtctgctacccccgagtcagggccaggatcagagccagccacctccgggtctgagacacccgggacttccgagagtgccacccctgagtccggacccgggtccgagcccgccacttccggctccgaaactcccggcacaagcgagagcgctaccccagagtcaggaccaggaacatctacagagccctctgaaggctccgctccagggtccccagccggcagtcccactagcaccgaggagggaacctctgaaagcgccacacccgaatcagggccagggtctgagcctgctaccagcggcagcgagacaccaggcacctctgagtccgccacaccagagtccggacccggatctcccgctgggagccccacctccactgaggagggatctcctgctggctctccaacatctactgaggaaggtacctcaaccgagccatccgagggatcagctcccggcacctcagagtcggcaaccccggagtctggacccggaacttccgaaagtgccacaccagagtccggtcccgggacttcagaatcagcaacacccgagtccggccctgggtctgaacccgccacaagtggtagtgagacaccaggatcagaacctgctacctcagggtcagagacacccggatctccggcaggctcaccaacctccactgaggagggcaccagcacagaaccaagcgagggctccgcacccggaacaagcactgaacccagtgagggttcagcacccggctctgagccggccacaagtggcagtgagacacccggcacttcagagagtgccacccccgagagtggcccaggcactagtaccgagccctctgaaggcagtgcgccagcctcgagcgaacaaaaactcatctcagaagaggatctgtcacctgcaaccggtcatcatcaccatcaccattga

SEQ ID NO: 1333 - protein, 2203 aa, synthetic construct
  REGION 1..2203: note = Description of Artificial Sequence: Synthetic polypeptide
ATRRYYLGAVELSWDYMQSDLGELPVDARFPPRVPKSFPFNTSVVYKKTLFVEFTDHLFNIAKPRPPWMGLLGPTIQAEVYDTVVITLKNMASHPVSLHAVGVSYWKASEGAEYDDQTSQREKEDDKVFPGGSHTYVWQVLKENGPMASDPLCLTYSYLSHVDLVKDLNSGLIGALLVCREGSLAKEKTQTLHKFILLFAVFDEGKSWHSETKNSLMQDRDAASARAWPKMHTVNGYVNRSLPGLIGCHRKSVYWHVIGMGTTPEVHSIFLEGHTFLVRNHRQASLEISPITFLTAQTLLMDLGQFLLFCHISSHQHDGMEAYVKVDSCPEEPQLRMKNNEEAEDYDDDLTDSEMDVVRFDDDNSPSFIQIRSVAKKHPKTWVHYIAAEEEDWDYAPLVLAPDGAPGASPGTSSTGSPGSSPSASTGTGPGSSPSASTGTGPGTPGSGTASSSPGSSTPSGATGSPGSSPSASTGTGPGASPGTSSTGSPGTPGSGTASSSPGSSTPSGATGSPGTPGSGTASSSPGASPGTSSTGSPGASPGTSSTGSPASSDRSYKSQYLNNGPQRIGRKYKKVRFMAYTDETFKTREAIQHESGILGPLLYGEVGDTLLIIFKNQASRPYNIYPHGITDVRPLYSRRLPKGVKHLKDFPILPGEIFKYKWTVTVEDGPTKSDPRCLTRYYSSFVNMERDLASGLIGPLLICYKESVDQRGNQIMSDKRNVILFSVFDENRSWYLTENIQRFLPNPAGVQLEDPEFQASNIMHSINGYVFDSLQLSVCLHEVAYWYILSIGAQTDFLSVFFSGYTFKHKMVYEDTLTLFPFSGETVFMSMENPGLWILGCHNSDFRNRGMTALLKVSSCDKNTGDYYEDSYEDISAYLLSKNNAIEPRSFSQNGAPSPAGSPTSTEEGTSESATPESGPGSEPATSGSETPGTSESATPESGPGTSTEPSEGSAPGTSTEPSEGSAPGTSTEPSEGSAPGTSTEPSEGSAPGTSTEPSEGSAPGTSTEPSEGSAPGSPAGSPTSTEEGTSTEPSEGSAPGASSPPVLKRHQAEITRTTLQSDQEEIDYDDTISVEMKKEDFDIYDEDENQSPRSFQKKTRHYFIAAVERLWDYGMSSSPHVLRNRAQSGSVPQFKKVVFQEFTDGSFTQPLYRGELNEHLGLLGPYIRAEVEDNIMVTFRNQASRPYSFYSSLISYEEDQRQGAEPRKNFVKPNETKTYFWKVQHHMAPTKDEFDCKAWAYFSDVDLEKDVHSGLIGPLLVCHTNTLNPAHGRQVTVQEFALFFTIFDETKSWYFTENMERNCRAPCNIQMEDPGAPGTPGSGTASSSPGASPGTSSTGSPGASPGTSSTGSPGASPGTSSTGSPGSSPSASTGTGPGTPGSGTASSSPGASPGTSSTGSPGASPGTSSTGSPGASPGTSSTGSPGSSTPSGATGSPGSSTPSGATGSPGASPGTSSTGSPASSTFKENYRFHAINGYIMDTLPGLVMAQDQRIRWYLLSMGSNENIHSIHFSGHVFTVRKKEEYKMALYNLYPGVFETVEMLPSKAGIWRVECLIGEHLHAGMSTLFLVYSNKCQTPLGMASGHIRDFQITASGQYGQWAPKLARLHYSGSINAWSTKEPFSWIKVDLLAPMIIHGIKTQGARQKFSSLYISQFIIMYSLDGKKWQTYRGNSTGTLMVFFGNVDSSGIKHNIFNPPIIARYIRLHPTHYSIRSTLRMELMGCDLNSCSMPLGMESKAISDAQITASSYFTNMFATWSPSKARLHLQGRSNAWRPQVNNPKEWLQVDFQKTMKVTGVTTQGVKSLLTSMYVKEFLISSSQDGHQWTLFFQNGKVKVFQGNQDSFTPVVNSLDPPLLTRYLRIHPQSWVHQIALRMEVLGCEAQDLYGAPGTSESATPESGPGSEPATSGSETPGTSESATPESGPGSEPATSGSETPGTSESATPESGPGTSTEPSEGSAPGSPAGSPTSTEEGTSESATPESGPGSEPATSGSETPGTSESATPESGPGSPAGSPTSTEEGSPAGSPTSTEEGTSTEPSEGSAPGTSESATPESGPGTSESATPESGPGTSESATPESGPGSEPATSGSETPGSEPATSGSETPGSPAGSPTSTEEGTSTEPSEGSAPGTSTEPSEGSAPGSEPATSGSETPGTSESATPESGPGTSTEPSEGSAPASSEQKLISEEDLSPATGHHHHHH

SEQ ID NO: 1334 - DNA, 6612 bp, synthetic construct
  misc_feature 1..6612: note = Description of Artificial Sequence: Synthetic polynucleotide
  source 1..6612: mol_type = other DNA
gccaccagaagatactacctgggtgcagtggaactgtcatgggactatatgcaaagtgatctcggtgagctgcctgtggacgcaagatttcctcctagagtgccaaaatcttttccattcaacacctcagtcgtgtacaaaaagactctgtttgtagaattcacggatcaccttttcaacatcgctaagccaaggccaccctggatgggtctgctaggtcctaccatccaggctgaggtttatgatacagtggtcattacacttaagaacatggcttcccatcctgtcagtcttcatgctgttggtgtatcctactggaaagcttctgagggagctgaatatgatgatcagaccagtcaaagggagaaagaagatgataaagtcttccctggtggaagccatacatatgtctggcaggtcctgaaagagaatggtccaatggcctctgacccactgtgccttacctactcatatctttctcatgtggacctggtaaaagacttgaattcaggcctcattggagccctactagtatgtagagaagggagtctggccaaggaaaagacacagaccttgcacaaatttatactactttttgctgtatttgatgaagggaaaagttggcactcagaaacaaagaactccttgatgcaggatagggatgctgcatctgctcgggcctggcctaaaatgcacacagtcaatggttatgtaaacaggtctctgccaggtctgattggatgccacaggaaatcagtctattggcatgtgattggaatgggcaccactcctgaagtgcactcaatattcctcgaaggtcacacatttcttgtgaggaaccatcgccaggctagcttggaaatctcgccaataactttccttactgctcaaacactcttgatggaccttggacagtttctactgttttgtcatatctcttcccaccaacatgatggcatggaagcttatgtcaaagtagacagctgtccagaggaaccccaactacgaatgaaaaataatgaagaagcggaagactatgatgatgatcttactgattctgaaatggatgtggtcaggtttgatgatgacaactctccttcctttatccaaattcgctcagttgccaagaagcatcctaaaacttgggtacattacattgctgctgaagaggaggactgggactatgctcccttagtcctcgcccccgatggcgcgccaggtgcctcgccgggaacatcatcaactggttcacccgggtcatccccctcggcctcaaccgggacgggtcccggctcatcccccagcgccagcactggaacaggtcctggcactcctggttccggtacggcatcgtcatccccgggaagctcaacaccgtccggagcgacaggatcacctggctcgtcaccttcggcgtcaactggaacggggccaggggcctcacccggaacgtcctcgactgggtcgcctggtacgccgggatcaggaacggcctcatcctcgcctgggtcctcaacgccctcgggtgcgactggttcgccgggaactcctggctcggggacggcctcgtcgtcgcctggggcatcaccggggacgagctccacggggtcccctggagcgtcaccggggacctcctcgacaggtagcccggcctcgagcgacagaagttataaaagtcaatatttgaacaatggccctcagcggattggtaggaagtacaaaaaagtccgatttatggcatacacagatgaaacctttaagactcgtgaagctattcagcatgaatcaggaatcttgggacctttactttatggggaagttggagacacactgttgattatatttaagaatcaagcaagcagaccatataacatctaccctcacggaatcactgatgtccgtcctttgtattcaaggagattaccaaaaggtgtaaaacatttgaaggattttccaattctgccaggagaaatattcaaatataaatggacagtgactgtagaagatgggccaactaaatcagatcctcggtgcctgacccgctattactctagtttcgttaatatggagagagatctagcttcaggactcattggccctctcctcatctgctacaaagaatctgtagatcaaagaggaaaccagataatgtcagacaagaggaatgtcatcctgttttctgtatttgatgagaaccgaagctggtacctcacagagaatatacaacgctttctccccaatccagctggagtgcagcttgaggatccagagttccaagcctccaacatcatgcacagcatcaatggctatgtttttgatagtttgcagttgtcagtttgtttgcatgaggtggcatactggtacattctaagcattggagcacagactgacttcctttctgtcttcttctctggatataccttcaaacacaaaatggtctatgaagacacactcaccctattcccattctcaggagaaactgtcttcatgtcgatggaaaacccaggtctatggattctggggtgccacaactcagactttcggaacagaggcatgaccgccttactgaaggtttctagttgtgacaagaacactggtgattattacgaggacagttatgaagatatttcagcatacttgctgagtaaaaacaatgccattgaaccaagaagcttctctcaaaacggcgcgccaagtcccgctggaagcccaactagcaccgaagaggggacctcagagtccgccacccccgagtccggccctggctctgagcctgccactagcggctccgagactcctggcacatccgaaagcgctacacccgagagtggacccggcacctctaccgagcccagtgagggctccgcccctggaacaagcaccgagcccagcgaaggcagcgccccagggacctccacagagcccagtgaaggcagtgctcctggcaccagcaccgaaccaagcgagggctctgcacccgggacctccaccgagccaagcgaaggctctgcccctggcacttccaccgagcccagcgaaggcagcgcccctgggagccccgctggctctcccaccagcactgaggagggcacatctaccgaaccaagtgaaggctctgcaccaggtgcctcgagcccaccagtcttgaaacgccatcaagctgaaataactcgtactactcttcagtcagatcaagaggaaatcgattatgatgataccatatcagttgaaatgaagaaggaagattttgacatttatgatgaggatgaaaatcagagcccccgcagctttcaaaagaaaacacgacactattttattgctgcagtggagaggctctgggattatgggatgagtagctccccacatgttctaagaaacagggctcagagtggcagtgtccctcagttcaagaaagttgttttccaggaatttactgatggctcctttactcagcccttataccgtggagaactaaatgaacatttgggactcctggggccatatataagagcagaagttgaagataatatcatggtaactttcagaaatcaggcctctcgtccctattccttctattctagccttatttcttatgaggaagatcagaggcaaggagcagaacctagaaaaaactttgtcaagcctaatgaaaccaaaacttacttttggaaagtgcaacatcatatggcacccactaaagatgagtttgactgcaaagcctgggcttatttctctgatgttgacctggaaaaagatgtgcactcaggcctgattggaccccttctggtctgccacactaacacactgaaccctgctcatgggagacaagtgacagtacaggaatttgctctgtttttcaccatctttgatgagaccaaaagctggtacttcactgaaaatatggaaagaaactgcagggctccctgcaatatccagatggaagatcccggcgcgccaggtacacccggatcgggtacagcgtcatcgagccccggtgcgtcacctggtacgtcgagcacggggtcgccaggggcgtcccctgggacgtcctcaacaggctcgcccggtgcgtcacccggcacgtcgtccacgggttcacctggtagctccccttccgcgtccactggcaccgggcctggaactccggggagcggcacagcgagctcgtcgccgggagcatcgcctgggacatcgagcaccgggtcgccaggagcatcgcccggaacatccagcacaggaagccccggcgcgtcgcccgggacatcaagcacaggttccccgggatcgagcacgccgtccggagccactggatcaccagggagctcgacaccttccggcgcaacgggatcgcccggagccagcccgggtacgtcaagcactggctcccctgcctcgagcacttttaaagagaattatcgcttccatgcaatcaatggctacataatggatacactacctggcttagtaatggctcaggatcaaaggattcgatggtatctgctcagcatgggcagcaatgaaaacatccattctattcatttcagtggacatgtgttcactgtacgaaaaaaagaggagtataaaatggcactgtacaatctctatccaggtgtttttgagacagtggaaatgttaccatccaaagctggaatttggcgggtggaatgccttattggcgagcatctacatgctgggatgagcacactttttctggtgtacagcaataagtgtcagactcccctgggaatggcttctggacacattagagattttcagattacagcttcaggacaatatggacagtgggccccaaagctggccagacttcattattccggatcaatcaatgcctggagcaccaaggagcccttttcttggatcaaggtggatctgttggcaccaatgattattcacggcatcaagacccagggtgcccgtcagaagttctccagcctctacatctctcagtttatcatcatgtatagtcttgatgggaagaagtggcagacttatcgaggaaattccactggaaccttaatggtcttctttggcaatgtggattcatctgggataaaacacaatatttttaaccctccaattattgctcgatacatccgtttgcacccaactcattatagcattcgcagcactcttcgcatggagttgatgggctgtgatttaaatagttgcagcatgccattgggaatggagagtaaagcaatatcagatgcacagattactgcttcatcctactttaccaatatgtttgccacctggtctccttcaaaagctcgacttcacctccaagggaggagtaatgcctggagacctcaggtgaataatccaaaagagtggctgcaagtggacttccagaagacaatgaaagtcacaggagtaactactcagggagtaaaatctctgcttaccagcatgtatgtgaaggagttcctcatctccagcagtcaagatggccatcagtggactctcttttttcagaatggcaaagtaaaggtttttcagggaaatcaagactccttcacacctgtggtgaactctctagacccaccgttactgactcgctaccttcgaattcacccccagagttgggtgcaccagattgccctgaggatggaggttctgggctgcgaggcacaggacctctacggcgcgccaggtacctcagagtctgctacccccgagtcagggccaggatcagagccagccacctccgggtctgagacacccgggacttccgagagtgccacccctgagtccggacccgggtccgagcccgccacttccggctccgaaactcccggcacaagcgagagcgctaccccagagtcaggaccaggaacatctacagagccctctgaaggctccgctccagggtccccagccggcagtcccactagcaccgaggagggaacctctgaaagcgccacacccgaatcagggccagggtctgagcctgctaccagcggcagcgagacaccaggcacctctgagtccgccacaccagagtccggacccggatctcccgctgggagccccacctccactgaggagggatctcctgctggctctccaacatctactgaggaaggtacctcaaccgagccatccgagggatcagctcccggcacctcagagtcggcaaccccggagtctggacccggaacttccgaaagtgccacaccagagtccggtcccgggacttcagaatcagcaacacccgagtccggccctgggtctgaacccgccacaagtggtagtgagacaccaggatcagaacctgctacctcagggtcagagacacccggatctccggcaggctcaccaacctccactgaggagggcaccagcacagaaccaagcgagggctccgcacccggaacaagcactgaacccagtgagggttcagcacccggctctgagccggccacaagtggcagtgagacacccggcacttcagagagtgccacccccgagagtggcccaggcactagtaccgagccctctgaaggcagtgcgccagcctcgagcgaacaaaaactcatctcagaagaggatctgtcacctgcaaccggtcatcatcaccatcaccattga

SEQ ID NO: 1335 - protein, 2206 aa, synthetic construct
  REGION 1..2206: note = Description of Artificial Sequence: Synthetic polypeptide
ATRRYYLGAVELSWDYMQSDLGELPVDARFPPRVPKSFPFNTSVVYKKTLFVEFTDHLFNIAKPRPPWMGLLGPTIQAEVYDTVVITLKNMASHPVSLHAVGVSYWKASEGAEYDDQTSQREKEDDKVFPGGSHTYVWQVLKENGPMASDPLCLTYSYLSHVDLVKDLNSGLIGALLVCREGSLAKEKTQTLHKFILLFAVFDEGKSWHSETKNSLMQDRDAASARAWPKMHTVNGYVNRSLPGLIGCHRKSVYWHVIGMGTTPEVHSIFLEGHTFLVRNHRQASLEISPITFLTAQTLLMDLGQFLLFCHISSHQHDGMEAYVKVDSCPEEPQLRMKNNEEAEDYDDDLTDSEMDVVRFDDDNSPSFIQIRSVAKKHPKTWVHYIAAEEEDWDYAPLVLAPDDRSYKSQYLNNGPQRIGRKYKKVRFMAYTDETFKTREAIQHESGILGPLLYGEVGDTLLIIFKNQASRPYNIYPHGITDVRPLYSRRLPKGVKHLKDFPILPGEIFKYKWTVTVEDGPTKSDPRCLTRYYSSFVNMERDLASGLIGPLLICYKESVDQRGNQIMSDKRNVILFSVFDENRSWYLTENIQRFLPNPAGVQLEDPEFQASNIMHSINGYVFDSLQLSVCLHEVAYWYILSIGAQTDFLSVFFSGYTFKHKMVYEDTLTLFPFSGETVFMSMENPGLWILGCHNSDFRNRGMTALLKVSSCDKNTGDYYEDSYEDISAYLLSKNNAIEPRSFSQNGAPSPAGSPTSTEEGTSESATPESGPGSEPATSGSETPGTSESATPESGPGTSTEPSEGSAPGTSTEPSEGSAPGTSTEPSEGSAPGTSTEPSEGSAPGTSTEPSEGSAPGTSTEPSEGSAPGSPAGSPTSTEEGTSTEPSEGSAPGASSPPVLKRHQAEITRTTLQSDQEEIDYDDTISVEMKKEDFDIYDEDENQSPRSFQKKTRHYFIAAVERLWDYGMSSSPHVLRNRAQGAPGTPGSGTASSSPGASPGTSSTGSPGASPGTSSTGSPGASPGTSSTGSPGSSPSASTGTGPGTPGSGTASSSPGASPGTSSTGSPGASPGTSSTGSPGASPGTSSTGSPGSSTPSGATGSPGSSTPSGATGSPGASPGTSSTGSPASSRAQSGSVPQFKKVVFQEFTDGSFTQPLYRGELNEHLGLLGPYIRAEVEDNIMVTFRNQASRPYSFYSSLISYEEDQRQGAEPRKNFVKPNETKTYFWKVQHHMAPTKDEFDCKAWAYFSDVDLEKDVHSGLIGPLLVCHTNTLNPAHGRQVTVQEFALFFTIFDETKSWYFTENMERNCRGAPSPAGSPTSTEEGTSESATPESGPGTSTEPSEGSAPGSPAGSPTSTEEGTSTEPSEGSAPGTSTEPSEGSAPGTSESATPESGPGSEPATSGSETPGSEPATSGSETPGSPAGSPTSTEEGTSESATPESGPGTSTEPSEGSAPGASSAPCNIQMEDPTFKENYRFHAINGYIMDTLPGLVMAQDQRIRWYLLSMGSNENIHSIHFSGHVFTVRKKEEYKMALYNLYPGVFETVEMLPSKAGIWRVECLIGEHLHAGMSTLFLVYSNKCQTPLGMASGHIRDFQITASGQYGQWAPKLARLHYSGSINAWSTKEPFSWIKVDLLAPMIIHGIKTQGARQKFSSLYISQFIIMYSLDGKKWQTYRGNSTGTLMVFFGNVDSSGIKHNIFNPPIIARYIRLHPTHYSIRSTLRMELMGCDLNSCSMPLGMESKAISDAQITASSYFTNMFATWSPSKARLHLQGRSNAWRPQVNNPKEWLQVDFQKTMKVTGVTTQGVKSLLTSMYVKEFLISSSQDGHQWTLFFQNGKVKVFQGNQDSFTPVVNSLDPPLLTRYLRIHPQSWVHQIALRMEVLGCEAQDLYGAPGTSESATPESGPGSEPATSGSETPGTSESATPESGPGSEPATSGSETPGTSESATPESGPGTSTEPSEGSAPGSPAGSPTSTEEGTSESATPESGPGSEPATSGSETPGTSESATPESGPGSPAGSPTSTEEGSPAGSPTSTEEGTSTEPSEGSAPGTSESATPESGPGTSESATPESGPGTSESATPESGPGSEPATSGSETPGSEPATSGSETPGSPAGSPTSTEEGTSTEPSEGSAPGTSTEPSEGSAPGSEPATSGSETPGTSESATPESGPGTSTEPSEGSAPASSEQKLISEEDLSPATGHHHHHH

SEQ ID NO: 1336 - DNA, 6621 bp, synthetic construct
  misc_feature 1..6621: note = Description of Artificial Sequence: Synthetic polynucleotide
  source 1..6621: mol_type = other DNA
gccaccagaagatactacctgggtgcagtggaactgtcatgggactatatgcaaagtgatctcggtgagctgcctgtggacgcaagatttcctcctagagtgccaaaatcttttccattcaacacctcagtcgtgtacaaaaagactctgtttgtagaattcacggatcaccttttcaacatcgctaagccaaggccaccctggatgggtctgctaggtcctaccatccaggctgaggtttatgatacagtggtcattacacttaagaacatggcttcccatcctgtcagtcttcatgctgttggtgtatcctactggaaagcttctgagggagctgaatatgatgatcagaccagtcaaagggagaaagaagatgataaagtcttccctggtggaagccatacatatgtctggcaggtcctgaaagagaatggtccaatggcctctgacccactgtgccttacctactcatatctttctcatgtggacctggtaaaagacttgaattcaggcctcattggagccctactagtatgtagagaagggagtctggccaaggaaaagacacagaccttgcacaaatttatactactttttgctgtatttgatgaagggaaaagttggcactcagaaacaaagaactccttgatgcaggatagggatgctgcatctgctcgggcctggcctaaaatgcacacagtcaatggttatgtaaacaggtctctgccaggtctgattggatgccacaggaaatcagtctattggcatgtgattggaatgggcaccactcctgaagtgcactcaatattcctcgaaggtcacacatttcttgtgaggaaccatcgccaggctagcttggaaatctcgccaataactttccttactgctcaaacactcttgatggaccttggacagtttctactgttttgtcatatctcttcccaccaacatgatggcatggaagcttatgtcaaagtagacagctgtccagaggaaccccaactacgaatgaaaaataatgaagaagcggaagactatgatgatgatcttactgattctgaaatggatgtggtcaggtttgatgatgacaactctccttcctttatccaaattcgctcagttgccaagaagcatcctaaaacttgggtacattacattgctgctgaagaggaggactgggactatgctcccttagtcctcgcccccgatgacagaagttataaaagtcaatatttgaacaatggccctcagcggattggtaggaagtacaaaaaagtccgatttatggcatacacagatgaaacctttaagactcgtgaagctattcagcatgaatcaggaatcttgggacctttactttatggggaagttggagacacactgttgattatatttaagaatcaagcaagcagaccatataacatctaccctcacggaatcactgatgtccgtcctttgtattcaaggagattaccaaaaggtgtaaaacatttgaaggattttccaattctgccaggagaaatattcaaatataaatggacagtgactgtagaagatgggccaactaaatcagatcctcggtgcctgacccgctattactctagtttcgttaatatggagagagatctagcttcaggactcattggccctctcctcatctgctacaaagaatctgtagatcaaagaggaaaccagataatgtcagacaagaggaatgtcatcctgttttctgtatttgatgagaaccgaagctggtacctcacagagaatatacaacgctttctccccaatccagctggagtgcagcttgaggatccagagttccaagcctccaacatcatgcacagcatcaatggctatgtttttgatagtttgcagttgtcagtttgtttgcatgaggtggcatactggtacattctaagcattggagcacagactgacttcctttctgtcttcttctctggatataccttcaaacacaaaatggtctatgaagacacactcaccctattcccattctcaggagaaactgtcttcatgtcgatggaaaacccaggtctatggattctggggtgccacaactcagactttcggaacagaggcatgaccgccttactgaaggtttctagttgtgacaagaacactggtgattattacgaggacagttatgaagatatttcagcatacttgctgagtaaaaacaatgccattgaaccaagaagcttctctcaaaacggcgcgccaagtcccgctggaagcccaactagcaccgaagaggggacctcagagtccgccacccccgagtccggccctggctctgagcctgccactagcggctccgagactcctggcacatccgaaagcgctacacccgagagtggacccggcacctctaccgagcccagtgagggctccgcccctggaacaagcaccgagcccagcgaaggcagcgccccagggacctccacagagcccagtgaaggcagtgctcctggcaccagcaccgaaccaagcgagggctctgcacccgggacctccaccgagccaagcgaaggctctgcccctggcacttccaccgagcccagcgaaggcagcgcccctgggagccccgctggctctcccaccagcactgaggagggcacatctaccgaaccaagtgaaggctctgcaccaggtgcctcgagcccaccagtcttgaaacgccatcaagctgaaataactcgtactactcttcagtcagatcaagaggaaatcgattatgatgataccatatcagttgaaatgaagaaggaagattttgacatttatgatgaggatgaaaatcagagcccccgcagctttcaaaagaaaacacgacactattttattgctgcagtggagaggctctgggattatgggatgagtagctccccacatgttctaagaaacagggctcagggcgcgccaggtacacccggatcgggtacagcgtcatcgagccccggtgcgtcacctggtacgtcgagcacggggtcgccaggggcgtcccctgggacgtcctcaacaggctcgcccggtgcgtcacccggcacgtcgtccacgggttcacctggtagctccccttccgcgtccactggcaccgggcctggaactccggggagcggcacagcgagctcgtcgccgggagcatcgcctgggacatcgagcaccgggtcgccaggagcatcgcccggaacatccagcacaggaagccccggcgcgtcgcccgggacatcaagcacaggttccccgggatcgagcacgccgtccggagccactggatcaccagggagctcgacaccttccggcgcaacgggatcgcccggagccagcccgggtacgtcaagcactggctcccctgcctcgagcagggctcagagtggcagtgtccctcagttcaagaaagttgttttccaggaatttactgatggctcctttactcagcccttataccgtggagaactaaatgaacatttgggactcctggggccatatataagagcagaagttgaagataatatcatggtaactttcagaaatcaggcctctcgtccctattccttctattctagccttatttcttatgaggaagatcagaggcaaggagcagaacctagaaaaaactttgtcaagcctaatgaaaccaaaacttacttttggaaagtgcaacatcatatggcacccactaaagatgagtttgactgcaaagcctgggcttatttctctgatgttgacctggaaaaagatgtgcactcaggcctgattggaccccttctggtctgccacactaacacactgaaccctgctcatgggagacaagtgacagtacaggaatttgctctgtttttcaccatctttgatgagaccaaaagctggtacttcactgaaaatatggaaagaaactgcaggggcgcgccatctccagccgggtccccaacttcgaccgaggaagggacctccgagtcagctaccccggagtccggtcctggcacctccaccgaaccatcggagggcagcgcccctgggagccctgccgggagccctacaagcaccgaagagggcaccagtacagagccaagtgaggggagcgcccctggtactagtactgaaccatccgaggggtcagctccaggcacgagtgagtccgctacccccgagagcggaccgggctcagagcccgccacgagtggcagtgaaactccaggctcagaacccgccactagtgggtcagagactccaggcagccctgccggatcccctacgtccaccgaggagggaacatctgagtccgcaacacccgaatccggtccaggcacctccacggaacctagtgaaggctcggcaccaggtgcctcgagcgctccctgcaatatccagatggaagatcccacttttaaagagaattatcgcttccatgcaatcaatggctacataatggatacactacctggcttagtaatggctcaggatcaaaggattcgatggtatctgctcagcatgggcagcaatgaaaacatccattctattcatttcagtggacatgtgttcactgtacgaaaaaaagaggagtataaaatggcactgtacaatctctatccaggtgtttttgagacagtggaaatgttaccatccaaagctggaatttggcgggtggaatgccttattggcgagcatctacatgctgggatgagcacactttttctggtgtacagcaataagtgtcagactcccctgggaatggcttctggacacattagagattttcagattacagcttcaggacaatatggacagtgggccccaaagctggccagacttcattattccggatcaatcaatgcctggagcaccaaggagcccttttcttggatcaaggtggatctgttggcaccaatgattattcacggcatcaagacccagggtgcccgtcagaagttctccagcctctacatctctcagtttatcatcatgtatagtcttgatgggaagaagtggcagacttatcgaggaaattccactggaaccttaatggtcttctttggcaatgtggattcatctgggataaaacacaatatttttaaccctccaattattgctcgatacatccgtttgcacccaactcattatagcattcgcagcactcttcgcatggagttgatgggctgtgatttaaatagttgcagcatgccattgggaatggagagtaaagcaatatcagatgcacagattactgcttcatcctactttaccaatatgtttgccacctggtctccttcaaaagctcgacttcacctccaagggaggagtaatgcctggagacctcaggtgaataatccaaaagagtggctgcaagtggacttccagaagacaatgaaagtcacaggagtaactactcagggagtaaaatctctgcttaccagcatgtatgtgaaggagttcctcatctccagcagtcaagatggccatcagtggactctcttttttcagaatggcaaagtaaaggtttttcagggaaatcaagactccttcacacctgtggtgaactctctagacccaccgttactgactcgctaccttcgaattcacccccagagttgggtgcaccagattgccctgaggatggaggttctgggctgcgaggcacaggacctctacggcgcgccaggtacctcagagtctgctacccccgagtcagggccaggatcagagccagccacctccgggtctgagacacccgggacttccgagagtgccacccctgagtccggacccgggtccgagcccgccacttccggctccgaaactcccggcacaagcgagagcgctaccccagagtcaggaccaggaacatctacagagccctctgaaggctccgctccagggtccccagccggcagtcccactagcaccgaggagggaacctctgaaagcgccacacccgaatcagggccagggtctgagcctgctaccagcggcagcgagacaccaggcacctctgagtccgccacaccagagtccggacccggatctcccgctgggagccccacctccactgaggagggatctcctgctggctctccaacatctactgaggaaggtacctcaaccgagccatccgagggatcagctcccggcacctcagagtcggcaaccccggagtctggacccggaacttccgaaagtgccacaccagagtccggtcccgggacttcagaatcagcaacacccgagtccggccctgggtctgaacccgccacaagtggtagtgagacaccaggatcagaacctgctacctcagggtcagagacacccggatctccggcaggctcaccaacctccactgaggagggcaccagcacagaaccaagcgagggctccgcacccggaacaagcactgaacccagtgagggttcagcacccggctctgagccggccacaagtggcagtgagacacccggcacttcagagagtgccacccccgagagtggcccaggcactagtaccgagccctctgaaggcagtgcgccagcctcgagcgaacaaaaactcatctcagaagaggatctgtcacctgcaaccggtcatcatcaccatcaccattga

SEQ ID NO: 1337 - protein, 2206 aa, synthetic construct
  REGION 1..2206: note = Description of Artificial Sequence: Synthetic polypeptide
ATRRYYLGAVELSWDYMQSDLGELPVDARFPPRVPKSFPFNTSVVYKKTLFVEFTDHLFNIAKPRPPWMGLLGPTIQAEVYDTVVITLKNMASHPVSLHAVGVSYWKASEGAEYDDQTSQREKEDDKVFPGGSHTYVWQVLKENGPMASDPLCLTYSYLSHVDLVKDLNSGLIGALLVCREGSLAKEKTQTLHKFILLFAVFDEGKSWHSETKNSLMQDRDAASARAWPKMHTVNGYVNRSLPGLIGCHRKSVYWHVIGMGTTPEVHSIFLEGHTFLVRNHRQASLEISPITFLTAQTLLMDLGQFLLFCHISSHQHDGMEAYVKVDSCPEEPQLRMKNNEEAEDYDDDLTDSEMDVVRFDDDNSPSFIQIRSVAKKHPKTWVHYIAAEEEDWDYAPLVLAPDDRSYKSQYLNNGPQRIGRKYKKVRFMAYTDETFKTREAIQHESGILGPLLYGEVGDTLLIIFKNQASRPYNIYPHGITDVRPLYSRRLPKGVKHLKDFPILPGEIFKYKWTVTVEDGPTKSDPRCLTRYYSSFVNMERDLASGLIGPLLICYKESVDQRGNQIMSDKRNVILFSVFDENRSWYLTENIQRFLPNPAGVQLEDPEFQASNIMHSINGYVFDSLQLSVCLHEVAYWYILSIGAQTDFLSVFFSGYTFKHKMVYEDTLTLFPFSGETVFMSMENPGLWILGCHNSDFRNRGMTALLKVSSCDKNTGDYYEDSYEDISAYLLSKNNAIEPRSFSQNGAPSPAGSPTSTEEGTSESATPESGPGSEPATSGSETPGTSESATPESGPGTSTEPSEGSAPGTSTEPSEGSAPGTSTEPSEGSAPGTSTEPSEGSAPGTSTEPSEGSAPGTSTEPSEGSAPGSPAGSPTSTEEGTSTEPSEGSAPGASSPPVLKRHQAEITRTTLQSDQEEIDYDDTISVEMKKEDFDIYDEDENQSPRSFQKKTRHYFIAAVERLWDYGMSSSPHVLRNRAQGAPGTPGSGTASSSPGASPGTSSTGSPGASPGTSSTGSPGASPGTSSTGSPGSSPSASTGTGPGTPGSGTASSSPGASPGTSSTGSPGASPGTSSTGSPGASPGTSSTGSPGSSTPSGATGSPGSSTPSGATGSPGASPGTSSTGSPASSRAQSGSVPQFKKVVFQEFTDGSFTQPLYRGELNEHLGLLGPYIRAEVEDNIMVTFRNQASRPYSFYSSLISYEEDQRQGAEPRKNFVKPNETKTYFWKVQHHMAPTKDEFDCKAWAYFSDVDLEKDVHSGLIGPLLVCHTNTLNPAHGRQVTVQEFALFFTIFDETKSWYFTENMERNCRGAPGTPGSGTASSSPGASPGTSSTGSPGASPGTSSTGSPGASPGTSSTGSPGSSPSASTGTGPGTPGSGTASSSPGASPGTSSTGSPGASPGTSSTGSPGASPGTSSTGSPGSSTPSGATGSPGSSTPSGATGSPGASPGTSSTGSPASSAPCNIQMEDPTFKENYRFHAINGYIMDTLPGLVMAQDQRIRWYLLSMGSNENIHSIHFSGHVFTVRKKEEYKMALYNLYPGVFETVEMLPSKAGIWRVECLIGEHLHAGMSTLFLVYSNKCQTPLGMASGHIRDFQITASGQYGQWAPKLARLHYSGSINAWSTKEPFSWIKVDLLAPMIIHGIKTQGARQKFSSLYISQFIIMYSLDGKKWQTYRGNSTGTLMVFFGNVDSSGIKHNIFNPPIIARYIRLHPTHYSIRSTLRMELMGCDLNSCSMPLGMESKAISDAQITASSYFTNMFATWSPSKARLHLQGRSNAWRPQVNNPKEWLQVDFQKTMKVTGVTTQGVKSLLTSMYVKEFLISSSQDGHQWTLFFQNGKVKVFQGNQDSFTPVVNSLDPPLLTRYLRIHPQSWVHQIALRMEVLGCEAQDLYGAPGTSESATPESGPGSEPATSGSETPGTSESATPESGPGSEPATSGSETPGTSESATPESGPGTSTEPSEGSAPGSPAGSPTSTEEGTSESATPESGPGSEPATSGSETPGTSESATPESGPGSPAGSPTSTEEGSPAGSPTSTEEGTSTEPSEGSAPGTSESATPESGPGTSESATPESGPGTSESATPESGPGSEPATSGSETPGSEPATSGSETPGSPAGSPTSTEEGTSTEPSEGSAPGTSTEPSEGSAPGSEPATSGSETPGTSESATPESGPGTSTEPSEGSAPASSEQKLISEEDLSPATGHHHHHH

SEQ ID NO: 1338 - DNA, 6621 bp, synthetic construct
  misc_feature 1..6621: note = Description of Artificial Sequence: Synthetic polynucleotide
  source 1..6621: mol_type = other DNA
gccaccagaagatactacctgggtgcagtggaactgtcatgggactatatgcaaagtgatctcggtgagctgcctgtggacgcaagatttcctcctagagtgccaaaatcttttccattcaacacctcagtcgtgtacaaaaagactctgtttgtagaattcacggatcaccttttcaacatcgctaagccaaggccaccctggatgggtctgctaggtcctaccatccaggctgaggtttatgatacagtggtcattacacttaagaacatggcttcccatcctgtcagtcttcatgctgttggtgtatcctactggaaagcttctgagggagctgaatatgatgatcagaccagtcaaagggagaaagaagatgataaagtcttccctggtggaagccatacatatgtctggcaggtcctgaaagagaatggtccaatggcctctgacccactgtgccttacctactcatatctttctcatgtggacctggtaaaagacttgaattcaggcctcattggagccctactagtatgtagagaagggagtctggccaaggaaaagacacagaccttgcacaaatttatactactttttgctgtatttgatgaagggaaaagttggcactcagaaacaaagaactccttgatgcaggatagggatgctgcatctgctcgggcctggcctaaaatgcacacagtcaatggttatgtaaacaggtctctgccaggtctgattggatgccacaggaaatcagtctattggcatgtgattggaatgggcaccactcctgaagtgcactcaatattcctcgaaggtcacacatttcttgtgaggaaccatcgccaggctagcttggaaatctcgccaataactttccttactgctcaaacactcttgatggaccttggacagtttctactgttttgtcatatctcttcccaccaacatgatggcatggaagcttatgtcaaagtagacagctgtccagaggaaccccaactacgaatgaaaaataatgaagaagcggaagactatgatgatgatcttactgattctgaaatggatgtggtcaggtttgatgatgacaactctccttcctttatccaaattcgctcagttgccaagaagcatcctaaaacttgggtacattacattgctgctgaagaggaggactgggactatgctcccttagtcctcgcccccgatgacagaagttataaaagtcaatatttgaacaatggccctcagcggattggtaggaagtacaaaaaagtccgatttatggcatacacagatgaaacctttaagactcgtgaagctattcagcatgaatcaggaatcttgggacctttactttatggggaagttggagacacactgttgattatatttaagaatcaagcaagcagaccatataacatctaccctcacggaatcactgatgtccgtcctttgtattcaaggagattaccaaaaggtgtaaaacatttgaaggattttccaattctgccaggagaaatattcaaatataaatggacagtgactgtagaagatgggccaactaaatcagatcctcggtgcctgacccgctattactctagtttcgttaatatggagagagatctagcttcaggactcattggccctctcctcatctgctacaaagaatctgtagatcaaagaggaaaccagataatgtcagacaagaggaatgtcatcctgttttctgtatttgatgagaaccgaagctggtacctcacagagaatatacaacgctttctccccaatccagctggagtgcagcttgaggatccagagttccaagcctccaacatcatgcacagcatcaatggctatgtttttgatagtttgcagttgtcagtttgtttgcatgaggtggcatactggtacattctaagcattggagcacagactgacttcctttctgtcttcttctctggatataccttcaaacacaaaatggtctatgaagacacactcaccctattcccattctcaggagaaactgtcttcatgtcgatggaaaacccaggtctatggattctggggtgccacaactcagactttcggaacagaggcatgaccgccttactgaaggtttctagttgtgacaagaacactggtgattattacgaggacagttatgaagatatttcagcatacttgctgagtaaaaacaatgccattgaaccaagaagcttctctcaaaacggcgcgccaagtcccgctggaagcccaactagcaccgaagaggggacctcagagtccgccacccccgagtccggccctggctctgagcctgccactagcggctccgagactcctggcacatccgaaagcgctacacccgagagtggacccggcacctctaccgagcccagtgagggctccgcccctggaacaagcaccgagcccagcgaaggcagcgccccagggacctccacagagcccagtgaaggcagtgctcctggcaccagcaccgaaccaagcgagggctctgcacccgggacctccaccgagccaagcgaaggctctgcccctggcacttccaccgagcccagcgaaggcagcgcccctgggagccccgctggctctcccaccagcactgaggagggcacatctaccgaaccaagtgaaggctctgcaccaggtgcctcgagcccaccagtcttgaaacgccatcaagctgaaataactcgtactactcttcagtcagatcaagaggaaatcgattatgatgataccatatcagttgaaatgaagaaggaagattttgacatttatgatgaggatgaaaatcagagcccccgcagctttcaaaagaaaacacgacactattttattgctgcagtggagaggctctgggattatgggatgagtagctccccacatgttctaagaaacagggctcagggcgcgccaggtacacccggatcgggtacagcgtcatcgagccccggtgcgtcacctggtacgtcgagcacggggtcgccaggggcgtcccctgggacgtcctcaacaggctcgcccggtgcgtcacccggcacgtcgtccacgggttcacctggtagctccccttccgcgtccactggcaccgggcctggaactccggggagcggcacagcgagctcgtcgccgggagcatcgcctgggacatcgagcaccgggtcgccaggagcatcgcccggaacatccagcacaggaagccccggcgcgtcgcccgggacatcaagcacaggttccccgggatcgagcacgccgtccggagccactggatcaccagggagctcgacaccttccggcgcaacgggatcgcccggagccagcccgggtacgtcaagcactggctcccctgcctcgagcagggctcagagtggcagtgtccctcagttcaagaaagttgttttccaggaatttactgatggctcctttactcagcccttataccgtggagaactaaatgaacatttgggactcctggggccatatataagagcagaagttgaagataatatcatggtaactttcagaaatcaggcctctcgtccctattccttctattctagccttatttcttatgaggaagatcagaggcaaggagcagaacctagaaaaaactttgtcaagcctaatgaaaccaaaacttacttttggaaagtgcaacatcatatggcacccactaaagatgagtttgactgcaaagcctgggcttatttctctgatgttgacctggaaaaagatgtgcactcaggcctgattggaccccttctggtctgccacactaacacactgaaccctgctcatgggagacaagtgacagtacaggaatttgctctgtttttcaccatctttgatgagaccaaaagctggtacttcactgaaaatatggaaagaaactgcaggggcgcgccaggtacacccggatcgggtacagcgtcatcgagccccggtgcgtcacctggtacgtcgagcacggggtcgccaggggcgtcccctgggacgtcctcaacaggctcgcccggtgcgtcacccggcacgtcgtccacgggttcacctggtagctccccttccgcgtccactggcaccgggcctggaactccggggagcggcacagcgagctcgtcgccgggagcatcgcctgggacatcgagcaccgggtcgccaggagcatcgcccggaacatccagcacaggaagccccggcgcgtcgcccgggacatcaagcacaggttccccgggatcgagcacgccgtccggagccactggatcaccagggagctcgacaccttccggcgcaacgggatcgcccggagccagcccgggtacgtcaagcactggctcccctgcctcgagcgctccctgcaatatccagatggaagatcccacttttaaagagaattatcgcttccatgcaatcaatggctacataatggatacactacctggcttagtaatggctcaggatcaaaggattcgatggtatctgctcagcatgggcagcaatgaaaacatccattctattcatttcagtggacatgtgttcactgtacgaaaaaaagaggagtataaaatggcactgtacaatctctatccaggtgtttttgagacagtggaaatgttaccatccaaagctggaatttggcgggtggaatgccttattggcgagcatctacatgctgggatgagcacactttttctggtgtacagcaataagtgtcagactcccctgggaatggcttctggacacattagagattttcagattacagcttcaggacaatatggacagtgggccccaaagctggccagacttcattattccggatcaatcaatgcctggagcaccaaggagcccttttcttggatcaaggtggatctgttggcaccaatgattattcacggcatcaagacccagggtgcccgtcagaagttctccagcctctacatctctcagtttatcatcatgtatagtcttgatgggaagaagtggcagacttatcgaggaaattccactggaaccttaatggtcttctttggcaatgtggattcatctgggataaaacacaatatttttaaccctccaattattgctcgatacatccgtttgcacccaactcattatagcattcgcagcactcttcgcatggagttgatgggctgtgatttaaatagttgcagcatgccattgggaatggagagtaaagcaatatcagatgcacagattactgcttcatcctactttaccaatatgtttgccacctggtctccttcaaaagctcgacttcacctccaagggaggagtaatgcctggagacctcaggtgaataatccaaaagagtggctgcaagtggacttccagaagacaatgaaagtcacaggagtaactactcagggagtaaaatctctgcttaccagcatgtatgtgaaggagttcctcatctccagcagtcaagatggccatcagtggactctcttttttcagaatggcaaagtaaaggtttttcagggaaatcaagactccttcacacctgtggtgaactctctagacccaccgttactgactcgctaccttcgaattcacccccagagttgggtgcaccagattgccctgaggatggaggttctgggctgcgaggcacaggacctctacggcgcgccaggtacctcagagtctgctacccccgagtcagggccaggatcagagccagccacctccgggtctgagacacccgggacttccgagagtgccacccctgagtccggacccgggtccgagcccgccacttccggctccgaaactcccggcacaagcgagagcgctaccccagagtcaggaccaggaacatctacagagccctctgaaggctccgctccagggtccccagccggcagtcccactagcaccgaggagggaacctctgaaagcgccacacccgaatcagggccagggtctgagcctgctaccagcggcagcgagacaccaggcacctctgagtccgccacaccagagtccggacccggatctcccgctgggagccccacctccactgaggagggatctcctgctggctctccaacatctactgaggaaggtacctcaaccgagccatccgagggatcagctcccggcacctcagagtcggcaaccccggagtctggacccggaacttccgaaagtgccacaccagagtccggtcccgggacttcagaatcagcaacacccgagtccggccctgggtctgaacccgccacaagtggtagtgagacaccaggatcagaacctgctacctcagggtcagagacacccggatctccggcaggctcaccaacctccactgaggagggcaccagcacagaaccaagcgagggctccgcacccggaacaagcactgaacccagtgagggttcagcacccggctctgagccggccacaagtggcagtgagacacccggcacttcagagagtgccacccccgagagtggcccaggcactagtaccgagccctctgaaggcagtgcgccagcctcgagcgaacaaaaactcatctcagaagaggatctgtcacctgcaaccggtcatcatcaccatcaccattga

SEQ ID NO: 1339 - protein, 2206 aa, synthetic construct
  REGION 1..2206: note = Description of Artificial Sequence: Synthetic polypeptide
ATRRYYLGAVELSWDYMQSDLGELPVDARFPPRVPKSFPFNTSVVYKKTLFVEFTDHLFNIAKPRPPWMGLLGPTIQAEVYDTVVITLKNMASHPVSLHAVGVSYWKASEGAEYDDQTSQREKEDDKVFPGGSHTYVWQVLKENGPMASDPLCLTYSYLSHVDLVKDLNSGLIGALLVCREGSLAKEKTQTLHKFILLFAVFDEGKSWHSETKNSLMQDRDAASARAWPKMHTVNGYVNRSLPGLIGCHRKSVYWHVIGMGTTPEVHSIFLEGHTFLVRNHRQASLEISPITFLTAQTLLMDLGQFLLFCHISSHQHDGMEAYVKVDSCPEEPQLRMKNNEEAEDYDDDLTDSEMDVVRFDDDNSPSFIQIRSVAKKHPKTWVHYIAAEEEDWDYAPLVLAPDDRSYKSQYLNNGPQRIGRKYKKVRFMAYTDETFKTREAIQHESGILGPLLYGEVGDTLLIIFKNQASRPYNIYPHGITDVRPLYSRRLPKGVKHLKDFPILPGEIFKYKWTVTVEDGPTKSDPRCLTRYYSSFVNMERDLASGLIGPLLICYKESVDQRGNQIMSDKRNVILFSVFDENRSWYLTENIQRFLPNPAGVQLEDPEFQASNIMHSINGYVFDSLQLSVCLHEVAYWYILSIGAQTDFLSVFFSGYTFKHKMVYEDTLTLFPFSGETVFMSMENPGLWILGCHNSDFRNRGMTALLKVSSCDKNTGDYYEDSYEDISAYLLSKNNAIEPRSFSQNGAPSPAGSPTSTEEGTSESATPESGPGSEPATSGSETPGTSESATPESGPGTSTEPSEGSAPGTSTEPSEGSAPGTSTEPSEGSAPGTSTEPSEGSAPGTSTEPSEGSAPGTSTEPSEGSAPGSPAGSPTSTEEGTSTEPSEGSAPGASSPPVLKRHQAEITRTTLQSDQEEIDYDDTISVEMKKEDFDIYDEDENQSPRSFQKKTRHYFIAAVERLWDYGMSSSPHVLRNRAQGAPGTPGSGTASSSPGASPGTSSTGSPGASPGTSSTGSPGASPGTSSTGSPGSSPSASTGTGPGTPGSGTASSSPGASPGTSSTGSPGASPGTSSTGSPGASPGTSSTGSPGSSTPSGATGSPGSSTPSGATGSPGASPGTSSTGSPASSRAQSGSVPQFKKVVFQEFTDGSFTQPLYRGELNEHLGLLGPYIRAEVEDNIMVTFRNQASRPYSFYSSLISYEEDQRQGAEPRKNFVKPNETKTYFWKVQHHMAPTKDEFDCKAWAYFSDVDLEKDVHSGLIGPLLVCHTNTLNPAHGRQVTVQEFALFFTIFDETKSWYFTENMERNCRAPCNIGAPSPAGSPTSTEEGTSESATPESGPGTSTEPSEGSAPGSPAGSPTSTEEGTSTEPSEGSAPGTSTEPSEGSAPGTSESATPESGPGSEPATSGSETPGSEPATSGSETPGSPAGSPTSTEEGTSESATPESGPGTSTEPSEGSAPGASSQMEDPTFKENYRFHAINGYIMDTLPGLVMAQDQRIRWYLLSMGSNENIHSIHFSGHVFTVRKKEEYKMALYNLYPGVFETVEMLPSKAGIWRVECLIGEHLHAGMSTLFLVYSNKCQTPLGMASGHIRDFQITASGQYGQWAPKLARLHYSGSINAWSTKEPFSWIKVDLLAPMIIHGIKTQGARQKFSSLYISQFIIMYSLDGKKWQTYRGNSTGTLMVFFGNVDSSGIKHNIFNPPIIARYIRLHPTHYSIRSTLRMELMGCDLNSCSMPLGMESKAISDAQITASSYFTNMFATWSPSKARLHLQGRSNAWRPQVNNPKEWLQVDFQKTMKVTGVTTQGVKSLLTSMYVKEFLISSSQDGHQWTLFFQNGKVKVFQGNQDSFTPVVNSLDPPLLTRYLRIHPQSWVHQIALRMEVLGCEAQDLYGAPGTSESATPESGPGSEPATSGSETPGTSESATPESGPGSEPATSGSETPGTSESATPESGPGTSTEPSEGSAPGSPAGSPTSTEEGTSESATPESGPGSEPATSGSETPGTSESATPESGPGSPAGSPTSTEEGSPAGSPTSTEEGTSTEPSEGSAPGTSESATPESGPGTSESATPESGPGTSESATPESGPGSEPATSGSETPGSEPATSGSETPGSPAGSPTSTEEGTSTEPSEGSAPGTSTEPSEGSAPGSEPATSGSETPGTSESATPESGPGTSTEPSEGSAPASSEQKLISEEDLSPATGHHHHHH

SEQ ID NO: 1340 - DNA, 6621 bp, synthetic construct
  misc_feature 1..6621: note = Description of Artificial Sequence: Synthetic polynucleotide
  source 1..6621: mol_type = other DNA
gccaccagaagatactacctgggtgcagtggaactgtcatgggactatatgcaaagtgatctcggtgagctgcctgtggacgcaagatttcctcctagagtgccaaaatcttttccattcaacacctcagtcgtgtacaaaaagactctgtttgtagaattcacggatcaccttttcaacatcgctaagccaaggccaccctggatgggtctgctaggtcctaccatccaggctgaggtttatgatacagtggtcattacacttaagaacatggcttcccatcctgtcagtcttcatgctgttggtgtatcctactggaaagcttctgagggagctgaatatgatgatcagaccagtcaaagggagaaagaagatgataaagtcttccctggtggaagccatacatatgtctggcaggtcctgaaagagaatggtccaatggcctctgacccactgtgccttacctactcatatctttctcatgtggacctggtaaaagacttgaattcaggcctcattggagccctactagtatgtagagaagggagtctggccaaggaaaagacacagaccttgcacaaatttatactactttttgctgtatttgatgaagggaaaagttggcactcagaaacaaagaactccttgatgcaggatagggatgctgcatctgctcgggcctggcctaaaatgcacacagtcaatggttatgtaaacaggtctctgccaggtctgattggatgccacaggaaatcagtctattggcatgtgattggaatgggcaccactcctgaagtgcactcaatattcctcgaaggtcacacatttcttgtgaggaaccatcgccaggctagcttggaaatctcgccaataactttccttactgctcaaacactcttgatggaccttggacagtttctactgttttgtcatatctcttcccaccaacatgatggcatggaagcttatgtcaaagtagacagctgtccagaggaaccccaactacgaatgaaaaataatgaagaagcggaagactatgatgatgatcttactgattctgaaatggatgtggtcaggtttgatgatgacaactctccttcctttatccaaattcgctcagttgccaagaagcatcctaaaacttgggtacattacattgctgctgaagaggaggactgggactatgctcccttagtcctcgcccccgatgacagaagttataaaagtcaatatttgaacaatggccctcagcggattggtaggaagtacaaaaaagtccgatttatggcatacacagatgaaacctttaagactcgtgaagctattcagcatgaatcaggaatcttgggacctttactttatggggaagttggagacacactgttgattatatttaagaatcaagcaagcagaccatataacatctaccctcacggaatcactgatgtccgtcctttgtattcaaggagattaccaaaaggtgtaaaacatttgaaggattttccaattctgccaggagaaatattcaaatataaatggacagtgactgtagaagatgggccaactaaatcagatcctcggtgcctgacccgctattactctagtttcgttaatatggagagagatctagcttcaggactcattggccctctcctcatctgctacaaagaatctgtagatcaaagaggaaaccagataatgtcagacaagaggaatgtcatcctgttttctgtatttgatgagaaccgaagctggtacctcacagagaatatacaacgctttctccccaatccagctggagtgcagcttgaggatccagagttccaagcctccaacatcatgcacagcatcaatggctatgtttttgatagtttgcagttgtcagtttgtttgcatgaggtggcatactggtacattctaagcattggagcacagactgacttcctttctgtcttcttctctggatataccttcaaacacaaaatggtctatgaagacacactcaccctattcccattctcaggagaaactgtcttcatgtcgatggaaaacccaggtctatggattctggggtgccacaactcagactttcggaacagaggcatgaccgccttactgaaggtttctagttgtgacaagaacactggtgattattacgaggacagttatgaagatatttcagcatacttgctgagtaaaaacaatgccattgaaccaagaagcttctctcaaaacggcgcgccaagtcccgctggaagcccaactagcaccgaagaggggacctcagagtccgccacccccgagtccggccctggctctgagcctgccactagcggctccgagactcctggcacatccgaaagcgctacacccgagagtggacccggcacctctaccgagcccagtgagggctccgcccctggaacaagcaccgagcccagcgaaggcagcgccccagggacctccacagagcccagtgaaggcagtgctcctggcaccagcaccgaaccaagcgagggctctgcacccgggacctccaccgagccaagcgaaggctctgcccctggcacttccaccgagcccagcgaaggcagcgcccctgggagccccgctggctctcccaccagcactgaggagggcacatctaccgaaccaagtgaaggctctgcaccaggtgcctcgagcccaccagtcttgaaacgccatcaagctgaaataactcgtactactcttcagtcagatcaagaggaaatcgattatgatgataccatatcagttgaaatgaagaaggaagattttgacatttatgatgaggatgaaaatcagagcccccgcagctttcaaaagaaaacacgacactattttattgctgcagtggagaggctctgggattatgggatgagtagctccccacatgttctaagaaacagggctcagggcgcgccaggtacacccggatcgggtacagcgtcatcgagccccggtgcgtcacctggtacgtcgagcacggggtcgccaggggcgtcccctgggacgtcctcaacaggctcgcccggtgcgtcacccggcacgtcgtccacgggttcacctggtagctccccttccgcgtccactggcaccgggcctggaactccggggagcggcacagcgagctcgtcgccgggagcatcgcctgggacatcgagcaccgggtcgccaggagcatcgcccggaacatccagcacaggaagccccggcgcgtcgcccgggacatcaagcacaggttccccgggatcgagcacgccgtccggagccactggatcaccagggagctcgacaccttccggcgcaacgggatcgcccggagccagcccgggtacgtcaagcactggctcccctgcctcgagcagggctcagagtggcagtgtccctcagttcaagaaagttgttttccaggaatttactgatggctcctttactcagcccttataccgtggagaactaaatgaacatttgggactcctggggccatatataagagcagaagttgaagataatatcatggtaactttcagaaatcaggcctctcgtccctattccttctattctagccttatttcttatgaggaagatcagaggcaaggagcagaacctagaaaaaactttgtcaagcctaatgaaaccaaaacttacttttggaaagtgcaacatcatatggcacccactaaagatgagtttgactgcaaagcctgggcttatttctctgatgttgacctggaaaaagatgtgcactcaggcctgattggaccccttctggtctgccacactaacacactgaaccctgctcatgggagacaagtgacagtacaggaatttgctctgtttttcaccatctttgatgagaccaaaagctggtacttcactgaaaatatggaaagaaactgcagggctccctgcaatatcggcgcgccatctccagccgggtccccaacttcgaccgaggaagggacctccgagtcagctaccccggagtccggtcctggcacctccaccgaaccatcggagggcagcgcccctgggagccctgccgggagccctacaagcaccgaagagggcaccagtacagagccaagtgaggggagcgcccctggtactagtactgaaccatccgaggggtcagctccaggcacgagtgagtccgctacccccgagagcggaccgggctcagagcccgccacgagtggcagtgaaactccaggctcagaacccgccactagtgggtcagagactccaggcagccctgccggatcccctacgtccaccgaggagggaacatctgagtccgcaacacccgaatccggtccaggcacctccacggaacctagtgaaggctcggcaccaggtgcctcgagccagatggaagatcccacttttaaagagaattatcgcttccatgcaatcaatggctacataatggatacactacctggcttagtaatggctcaggatcaaaggattcgatggtatctgctcagcatgggcagcaatgaaaacatccattctattcatttcagtggacatgtgttcactgtacgaaaaaaagaggagtataaaatggcactgtacaatctctatccaggtgtttttgagacagtggaaatgttaccatccaaagctggaatttggcgggtggaatgccttattggcgagcatctacatgctgggatgagcacactttttctggtgtacagcaataagtgtcagactcccctgggaatggcttctggacacattagagattttcagattacagcttcaggacaatatggacagtgggccccaaagctggccagacttcattattccggatcaatcaatgcctggagcaccaaggagcccttttcttggatcaaggtggatctgttggcaccaatgattattcacggcatcaagacccagggtgcccgtcagaagttctccagcctctacatctctcagtttatcatcatgtatagtcttgatgggaagaagtggcagacttatcgaggaaattccactggaaccttaatggtcttctttggcaatgtggattcatctgggataaaacacaatatttttaaccctccaattattgctcgatacatccgtttgcacccaactcattatagcattcgcagcactcttcgcatggagttgatgggctgtgatttaaatagttgcagcatgccattgggaatggagagtaaagcaatatcagatgcacagattactgcttcatcctactttaccaatatgtttgccacctggtctccttcaaaagctcgacttcacctccaagggaggagtaatgcctggagacctcaggtgaataatccaaaagagtggctgcaagtggacttccagaagacaatgaaagtcacaggagtaactactcagggagtaaaatctctgcttaccagcatgtatgtgaaggagttcctcatctccagcagtcaagatggccatcagtggactctcttttttcagaatggcaaagtaaaggtttttcagggaaatcaagactccttcacacctgtggtgaactctctagacccaccgttactgactcgctaccttcgaattcacccccagagttgggtgcaccagattgccctgaggatggaggttctgggctgcgaggcacaggacctctacggcgcgccaggtacctcagagtctgctacccccgagtcagggccaggatcagagccagccacctccgggtctgagacacccgggacttccgagagtgccacccctgagtccggacccgggtccgagcccgccacttccggctccgaaactcccggcacaagcgagagcgctaccccagagtcaggaccaggaacatctacagagccctctgaaggctccgctccagggtccccagccggcagtcccactagcaccgaggagggaacctctgaaagcgccacacccgaatcagggccagggtctgagcctgctaccagcggcagcgagacaccaggcacctctgagtccgccacaccagagtccggacccggatctcccgctgggagccccacctccactgaggagggatctcctgctggctctccaacatctactgaggaaggtacctcaaccgagccatccgagggatcagctcccggcacctcagagtcggcaaccccggagtctggacccggaacttccgaaagtgccacaccagagtccggtcccgggacttcagaatcagcaacacccgagtccggccctgggtctgaacccgccacaagtggtagtgagacaccaggatcagaacctgctacctcagggtcagagacacccggatctccggcaggctcaccaacctccactgaggagggcaccagcacagaaccaagcgagggctccgcacccggaacaagcactgaacccagtgagggttcagcacccggctctgagccggccacaagtggcagtgagacacccggcacttcagagagtgccacccccgagagtggcccaggcactagtaccgagccctctgaaggcagtgcgccagcctcgagcgaacaaaaactcatctcagaagaggatctgtcacctgcaaccggtcatcatcaccatcaccattga

SEQ ID NO: 1341 - protein, 2206 aa, synthetic construct
  REGION 1..2206: note = Description of Artificial Sequence: Synthetic polypeptide
ATRRYYLGAVELSWDYMQSDLGELPVDARFPPRVPKSFPFNTSVVYKKTLFVEFTDHLFNIAKPRPPWMGLLGPTIQAEVYDTVVITLKNMASHPVSLHAVGVSYWKASEGAEYDDQTSQREKEDDKVFPGGSHTYVWQVLKENGPMASDPLCLTYSYLSHVDLVKDLNSGLIGALLVCREGSLAKEKTQTLHKFILLFAVFDEGKSWHSETKNSLMQDRDAASARAWPKMHTVNGYVNRSLPGLIGCHRKSVYWHVIGMGTTPEVHSIFLEGHTFLVRNHRQASLEISPITFLTAQTLLMDLGQFLLFCHISSHQHDGMEAYVKVDSCPEEPQLRMKNNEEAEDYDDDLTDSEMDVVRFDDDNSPSFIQIRSVAKKHPKTWVHYIAAEEEDWDYAPLVLAPDDRSYKSQYLNNGPQRIGRKYKKVRFMAYTDETFKTREAIQHESGILGPLLYGEVGDTLLIIFKNQASRPYNIYPHGITDVRPLYSRRLPKGVKHLKDFPILPGEIFKYKWTVTVEDGPTKSDPRCLTRYYSSFVNMERDLASGLIGPLLICYKESVDQRGNQIMSDKRNVILFSVFDENRSWYLTENIQRFLPNPAGVQLEDPEFQASNIMHSINGYVFDSLQLSVCLHEVAYWYILSIGAQTDFLSVFFSGYTFKHKMVYEDTLTLFPFSGETVFMSMENPGLWILGCHNSDFRNRGMTALLKVSSCDKNTGDYYEDSYEDISAYLLSKNNAIEPRSFSQNGAPSPAGSPTSTEEGTSESATPESGPGSEPATSGSETPGTSESATPESGPGTSTEPSEGSAPGTSTEPSEGSAPGTSTEPSEGSAPGTSTEPSEGSAPGTSTEPSEGSAPGTSTEPSEGSAPGSPAGSPTSTEEGTSTEPSEGSAPGASSPPVLKRHQAEITRTTLQSDQEEIDYDDTISVEMKKEDFDIYDEDENQSPRSFQKKTRHYFIAAVERLWDYGMSSSPHVLRNRAQGAPGTPGSGTASSSPGASPGTSSTGSPGASPGTSSTGSPGASPGTSSTGSPGSSPSASTGTGPGTPGSGTASSSPGASPGTSSTGSPGASPGTSSTGSPGASPGTSSTGSPGSSTPSGATGSPGSSTPSGATGSPGASPGTSSTGSPASSRAQSGSVPQFKKVVFQEFTDGSFTQPLYRGELNEHLGLLGPYIRAEVEDNIMVTFRNQASRPYSFYSSLISYEEDQRQGAEPRKNFVKPNETKTYFWKVQHHMAPTKDEFDCKAWAYFSDVDLEKDVHSGLIGPLLVCHTNTLNPAHGRQVTVQEFALFFTIFDETKSWYFTENMERNCRAPCNIGAPGTPGSGTASSSPGASPGTSSTGSPGASPGTSSTGSPGASPGTSSTGSPGSSPSASTGTGPGTPGSGTASSSPGASPGTSSTGSPGASPGTSSTGSPGASPGTSSTGSPGSSTPSGATGSPGSSTPSGATGSPGASPGTSSTGSPASSQMEDPTFKENYRFHAINGYIMDTLPGLVMAQDQRIRWYLLSMGSNENIHSIHFSGHVFTVRKKEEYKMALYNLYPGVFETVEMLPSKAGIWRVECLIGEHLHAGMSTLFLVYSNKCQTPLGMASGHIRDFQITASGQYGQWAPKLARLHYSGSINAWSTKEPFSWIKVDLLAPMIIHGIKTQGARQKFSSLYISQFIIMYSLDGKKWQTYRGNSTGTLMVFFGNVDSSGIKHNIFNPPIIARYIRLHPTHYSIRSTLRMELMGCDLNSCSMPLGMESKAISDAQITASSYFTNMFATWSPSKARLHLQGRSNAWRPQVNNPKEWLQVDFQKTMKVTGVTTQGVKSLLTSMYVKEFLISSSQDGHQWTLFFQNGKVKVFQGNQDSFTPVVNSLDPPLLTRYLRIHPQSWVHQIALRMEVLGCEAQDLYGAPGTSESATPESGPGSEPATSGSETPGTSESATPESGPGSEPATSGSETPGTSESATPESGPGTSTEPSEGSAPGSPAGSPTSTEEGTSESATPESGPGSEPATSGSETPGTSESATPESGPGSPAGSPTSTEEGSPAGSPTSTEEGTSTEPSEGSAPGTSESATPESGPGTSESATPESGPGTSESATPESGPGSEPATSGSETPGSEPATSGSETPGSPAGSPTSTEEGTSTEPSEGSAPGTSTEPSEGSAPGSEPATSGSETPGTSESATPESGPGTSTEPSEGSAPASSEQKLISEEDLSPATGHHHHHH

SEQ ID NO: 1342 - DNA, 6621 bp, synthetic construct
  misc_feature 1..6621: note = Description of Artificial Sequence: Synthetic polynucleotide
  source 1..6621: mol_type = other DNA
gccaccagaagatactacctgggtgcagtggaactgtcatgggactatatgcaaagtgatctcggtgagctgcctgtggacgcaagatttcctcctagagtgccaaaatcttttccattcaacacctcagtcgtgtacaaaaagactctgtttgtagaattcacggatcaccttttcaacatcgctaagccaaggccaccctggatgggtctgctaggtcctaccatccaggctgaggtttatgatacagtggtcattacacttaagaacatggcttcccatcctgtcagtcttcatgctgttggtgtatcctactggaaagcttctgagggagctgaatatgatgatcagaccagtcaaagggagaaagaagatgataaagtcttccctggtggaagccatacatatgtctggcaggtcctgaaagagaatggtccaatggcctctgacccactgtgccttacctactcatatctttctcatgtggacctggtaaaagacttgaattcaggcctcattggagccctactagtatgtagagaagggagtctggccaaggaaaagacacagaccttgcacaaatttatactactttttgctgtatttgatgaagggaaaagttggcactcagaaacaaagaactccttgatgcaggatagggatgctgcatctgctcgggcctggcctaaaatgcacacagtcaatggttatgtaaacaggtctctgccaggtctgattggatgccacaggaaatcagtctattggcatgtgattggaatgggcaccactcctgaagtgcactcaatattcctcgaaggtcacacatttcttgtgaggaaccatcgccaggctagcttggaaatctcgccaataactttccttactgctcaaacactcttgatggaccttggacagtttctactgttttgtcatatctcttcccaccaacatgatggcatggaagcttatgtcaaagtagacagctgtccagaggaaccccaactacgaatgaaaaataatgaagaagcggaagactatgatgatgatcttactgattctgaaatggatgtggtcaggtttgatgatgacaactctccttcctttatccaaattcgctcagttgccaagaagcatcctaaaacttgggtacattacattgctgctgaagaggaggactgggactatgctcccttagtcctcgcccccgatgacagaagttataaaagtcaatatttgaacaatggccctcagcggattggtaggaagtacaaaaaagtccgatttatggcatacacagatgaaacctttaagactcgtgaagctattcagcatgaatcaggaatcttgggacctttactttatggggaagttggagacacactgttgattatatttaagaatcaagcaagcagaccatataacatctaccctcacggaatcactgatgtccgtcctttgtattcaaggagattaccaaaaggtgtaaaacatttgaaggattttccaattctgccaggagaaatattcaaatataaatggacagtgactgtagaagatgggccaactaaatcagatcctcggtgcctgacccgctattactctagtttcgttaatatggagagagatctagcttcaggactcattggccctctcctcatctgctacaaagaatctgtagatcaaagaggaaaccagataatgtcagacaagaggaatgtcatcctgttttctgtatttgatgagaaccgaagctggtacctcacagagaatatacaacgctttctccccaatccagctggagtgcagcttgaggatccagagttccaagcctccaacatcatgcacagcatcaatggctatgtttttgatagtttgcagttgtcagtttgtttgcatgaggtggcatactggtacattctaagcattggagcacagactgacttcctttctgtcttcttctctggatataccttcaaacacaaaatggtctatgaagacacactcaccctattcccattctcaggagaaactgtcttcatgtcgatggaaaacccaggtctatggattctggggtgccacaactcagactttcggaacagaggcatgaccgccttactgaaggtttctagttgtgacaagaacactggtgattattacgaggacagttatgaagatatttcagcatacttgctgagtaaaaacaatgccattgaaccaagaagcttctctcaaaacggcgcgccaagtcccgctggaagcccaactagcaccgaagaggggacctcagagtccgccacccccgagtccggccctggctctgagcctgccactagcggctccgagactcctggcacatccgaaagcgctacacccgagagtggacccggcacctctaccgagcccagtgagggctccgcccctggaacaagcaccgagcccagcgaaggcagcgccccagggacctccacagagcccagtgaaggcagtgctcctggcaccagcaccgaaccaagcgagggctctgcacccgggacctccaccgagccaagcgaaggctctgcccctggcacttccaccgagcccagcgaaggcagcgcccctgggagccccgctggctctcccaccagcactgaggagggcacatctaccgaaccaagtgaaggctctgcaccaggtgcctcgagcccaccagtcttgaaacgccatcaagctgaaataactcgtactactcttcagtcagatcaagaggaaatcgattatgatgataccatatcagttgaaatgaagaaggaagattttgacatttatgatgaggatgaaaatcagagcccccgcagctttcaaaagaaaacacgacactattttattgctgcagtggagaggctctgggattatgggatgagtagctccccacatgttctaagaaacagggctcagggcgcgccaggtacacccggatcgggtacagcgtcatcgagccccggtgcgtcacctggtacgtcgagcacggggtcgccaggggcgtcccctgggacgtcctcaacaggctcgcccggtgcgtcacccggcacgtcgtccacgggttcacctggtagctccccttccgcgtccactggcaccgggcctggaactccggggagcggcacagcgagctcgtcgccgggagcatcgcctgggacatcgagcaccgggtcgccaggagcatcgcccggaacatccagcacaggaagccccggcgcgtcgcccgggacatcaagcacaggttccccgggatcgagcacgccgtccggagccactggatcaccagggagctcgacaccttccggcgcaacgggatcgcccggagccagcccgggtacgtcaagcactggctcccctgcctcgagcagggctcagagtggcagtgtccctcagttcaagaaagttgttttccaggaatttactgatggctcctttactcagcccttataccgtggagaactaaatgaacatttgggactcctggggccatatataagagcagaagttgaagataatatcatggtaactttcagaaatcaggcctctcgtccctattccttctattctagccttatttcttatgaggaagatcagaggcaaggagcagaacctagaaaaaactttgtcaagcctaatgaaaccaaaacttacttttggaaagtgcaacatcatatggcacccactaaagatgagtttgactgcaaagcctgggcttatttctctgatgttgacctggaaaaagatgtgcactcaggcctgattggaccccttctggtctgccacactaacacactgaaccctgctcatgggagacaagtgacagtacaggaatttgctctgtttttcaccatctttgatgagaccaaaagctggtacttcactgaaaatatggaaagaaactgcagggctccctgcaatatcggcgcgccaggtacacccggatcgggtacagcgtcatcgagccccggtgcgtcacctggtacgtcgagcacggggtcgccaggggcgtcccctgggacgtcctcaacaggctcgcccggtgcgtcacccggcacgtcgtccacgggttcacctggtagctccccttccgcgtccactggcaccgggcctggaactccggggagcggcacagcgagctcgtcgccgggagcatcgcctgggacatcgagcaccgggtcgccaggagcatcgcccggaacatccagcacaggaagccccggcgcgtcgcccgggacatcaagcacaggttccccgggatcgagcacgccgtccggagccactggatcaccagggagctcgacaccttccggcgcaacgggatcgcccggagccagcccgggtacgtcaagcactggctcccctgcctcgagccagatggaagatcccacttttaaagagaattatcgcttccatgcaatcaatggctacataatggatacactacctggcttagtaatggctcaggatcaaaggattcgatggtatctgctcagcatgggcagcaatgaaaacatccattctattcatttcagtggacatgtgttcactgtacgaaaaaaagaggagtataaaatggcactgtacaatctctatccaggtgtttttgagacagtggaaatgttaccatccaaagctggaatttggcgggtggaatgccttattggcgagcatctacatgctgggatgagcacactttttctggtgtacagcaataagtgtcagactcccctgggaatggcttctggacacattagagattttcagattacagcttcaggacaatatggacagtgggccccaaagctggccagacttcattattccggatcaatcaatgcctggagcaccaaggagcccttttcttggatcaaggtggatctgttggcaccaatgattattcacggcatcaagacccagggtgcccgtcagaagttctccagcctctacatctctcagtttatcatcatgtatagtcttgatgggaagaagtggcagacttatcgaggaaattccactggaaccttaatggtcttctttggcaatgtggattcatctgggataaaacacaatatttttaaccctccaattattgctcgatacatccgtttgcacccaactcattatagcattcgcagcactcttcgcatggagttgatgggctgtgatttaaatagttgcagcatgccattgggaatggagagtaaagcaatatcagatgcacagattactgcttcatcctactttaccaatatgtttgccacctggtctccttcaaaagctcgacttcacctccaagggaggagtaatgcctggagacctcaggtgaataatccaaaagagtggctgcaagtggacttccagaagacaatgaaagtcacaggagtaactactcagggagtaaaatctctgcttaccagcatgtatgtgaaggagttcctcatctccagcagtcaagatggccatcagtggactctcttttttcagaatggcaaagtaaaggtttttcagggaaatcaagactccttcacacctgtggtgaactctctagacccaccgttactgactcgctaccttcgaattcacccccagagttgggtgcaccagattgccctgaggatggaggttctgggctgcgaggcacaggacctctacggcgcgccaggtacctcagagtctgctacccccgagtcagggccaggatcagagccagccacctccgggtctgagacacccgggacttccgagagtgccacccctgagtccggacccgggtccgagcccgccacttccggctccgaaactcccggcacaagcgagagcgctaccccagagtcaggaccaggaacatctacagagccctctgaaggctccgctccagggtccccagccggcagtcccactagcaccgaggagggaacctctgaaagcgccacacccgaatcagggccagggtctgagcctgctaccagcggcagcgagacaccaggcacctctgagtccgccacaccagagtccggacccggatctcccgctgggagccccacctccactgaggagggatctcctgctggctctccaacatctactgaggaaggtacctcaaccgagccatccgagggatcagctcccggcacctcagagtcggcaaccccggagtctggacccggaacttccgaaagtgccacaccagagtccggtcccgggacttcagaatcagcaacacccgagtccggccctgggtctgaacccgccacaagtggtagtgagacaccaggatcagaacctgctacctcagggtcagagacacccggatctccggcaggctcaccaacctccactgaggagggcaccagcacagaaccaagcgagggctccgcacccggaacaagcactgaacccagtgagggttcagcacccggctctgagccggccacaagtggcagtgagacacccggcacttcagagagtgccacccccgagagtggcccaggcactagtaccgagccctctgaaggcagtgcgccagcctcgagcgaacaaaaactcatctcagaagaggatctgtcacctgcaaccggtcatcatcaccatcaccattga

SEQ ID NO: 1343 - protein, 2206 aa, synthetic construct
  REGION 1..2206: note = Description of Artificial Sequence: Synthetic polypeptide
ATRRYYLGAVELSWDYMQSDLGELPVDARFPPRVPKSFPFNTSVVYKKTLFVEFTDHLFNIAKPRPPWMGLLGPTIQAEVYDTVVITLKNMASHPVSLHAVGVSYWKASEGAEYDDQTSQREKEDDKVFPGGSHTYVWQVLKENGPMASDPLCLTYSYLSHVDLVKDLNSGLIGALLVCREGSLAKEKTQTLHKFILLFAVFDEGKSWHSETKNSLMQDRDAASARAWPKMHTVNGYVNRSLPGLIGCHRKSVYWHVIGMGTTPEVHSIFLEGHTFLVRNHRQASLEISPITFLTAQTLLMDLGQFLLFCHISSHQHDGMEAYVKVDSCPEEPQLRMKNNEEAEDYDDDLTDSEMDVVRFDDDNSPSFIQIRSVAKKHPKTWVHYIAAEEEDWDYAPLVLAPDDRSYKSQYLNNGPQRIGRKYKKVRFMAYTDETFKTREAIQHESGILGPLLYGEVGDTLLIIFKNQASRPYNIYPHGITDVRPLYSRRLPKGVKHLKDFPILPGEIFKYKWTVTVEDGPTKSDPRCLTRYYSSFVNMERDLASGLIGPLLICYKESVDQRGNQIMSDKRNVILFSVFDENRSWYLTENIQRFLPNPAGVQLEDPEFQASNIMHSINGYVFDSLQLSVCLHEVAYWYILSIGAQTDFLSVFFSGYTFKHKMVYEDTLTLFPFSGETVFMSMENPGLWILGCHNSDFRNRGMTALLKVSSCDKNTGDYYEDSYEDISAYLLSKNNAIEPRSFSQNGAPSPAGSPTSTEEGTSESATPESGPGSEPATSGSETPGTSESATPESGPGTSTEPSEGSAPGTSTEPSEGSAPGTSTEPSEGSAPGTSTEPSEGSAPGTSTEPSEGSAPGTSTEPSEGSAPGSPAGSPTSTEEGTSTEPSEGSAPGASSPPVLKRHQAEITRTTLQSDQEEIDYDDTISVEMKKEDFDIYDEDENQSPRSFQKKTRHYFIAAVERLWDYGMSSSPHVLRNRAQGAPGTPGSGTASSSPGASPGTSSTGSPGASPGTSSTGSPGASPGTSSTGSPGSSPSASTGTGPGTPGSGTASSSPGASPGTSSTGSPGASPGTSSTGSPGASPGTSSTGSPGSSTPSGATGSPGSSTPSGATGSPGASPGTSSTGSPASSRAQSGSVPQFKKVVFQEFTDGSFTQPLYRGELNEHLGLLGPYIRAEVEDNIMVTFRNQASRPYSFYSSLISYEEDQRQGAEPRKNFVKPNETKTYFWKVQHHMAPTKDEFDCKAWAYFSDVDLEKDVHSGLIGPLLVCHTNTLNPAHGRQVTVQEFALFFTIFDETKSWYFTENMERNCRAPCNIQMEDPGAPSPAGSPTSTEEGTSESATPESGPGTSTEPSEGSAPGSPAGSPTSTEEGTSTEPSEGSAPGTSTEPSEGSAPGTSESATPESGPGSEPATSGSETPGSEPATSGSETPGSPAGSPTSTEEGTSESATPESGPGTSTEPSEGSAPGASSTFKENYRFHAINGYIMDTLPGLVMAQDQRIRWYLLSMGSNENIHSIHFSGHVFTVRKKEEYKMALYNLYPGVFETVEMLPSKAGIWRVECLIGEHLHAGMSTLFLVYSNKCQTPLGMASGHIRDFQITASGQYGQWAPKLARLHYSGSINAWSTKEPFSWIKVDLLAPMIIHGIKTQGARQKFSSLYISQFIIMYSLDGKKWQTYRGNSTGTLMVFFGNVDSSGIKHNIFNPPIIARYIRLHPTHYSIRSTLRMELMGCDLNSCSMPLGMESKAISDAQITASSYFTNMFATWSPSKARLHLQGRSNAWRPQVNNPKEWLQVDFQKTMKVTGVTTQGVKSLLTSMYVKEFLISSSQDGHQWTLFFQNGKVKVFQGNQDSFTPVVNSLDPPLLTRYLRIHPQSWVHQIALRMEVLGCEAQDLYGAPGTSESATPESGPGSEPATSGSETPGTSESATPESGPGSEPATSGSETPGTSESATPESGPGTSTEPSEGSAPGSPAGSPTSTEEGTSESATPESGPGSEPATSGSETPGTSESATPESGPGSPAGSPTSTEEGSPAGSPTSTEEGTSTEPSEGSAPGTSESATPESGPGTSESATPESGPGTSESATPESGPGSEPATSGSETPGSEPATSGSETPGSPAGSPTSTEEGTSTEPSEGSAPGTSTEPSEGSAPGSEPATSGSETPGTSESATPESGPGTSTEPSEGSAPASSEQKLISEEDLSPATGHHHHHH

SEQ ID NO: 1344 - DNA, 6621 bp, synthetic construct
  misc_feature 1..6621: note = Description of Artificial Sequence: Synthetic polynucleotide
  source 1..6621: mol_type = other DNA
gccaccagaagatactacctgggtgcagtggaactgtcatgggactatatgcaaagtgatctcggtgagctgcctgtggacgcaagatttcctcctagagtgccaaaatcttttccattcaacacctcagtcgtgtacaaaaagactctgtttgtagaattcacggatcaccttttcaacatcgctaagccaaggccaccctggatgggtctgctaggtcctaccatccaggctgaggtttatgatacagtggtcattacacttaagaacatggcttcccatcctgtcagtcttcatgctgttggtgtatcctactggaaagcttctgagggagctgaatatgatgatcagaccagtcaaagggagaaagaagatgataaagtcttccctggtggaagccatacatatgtctggcaggtcctgaaagagaatggtccaatggcctctgacccactgtgccttacctactcatatctttctcatgtggacctggtaaaagacttgaattcaggcctcattggagccctactagtatgtagagaagggagtctggccaaggaaaagacacagaccttgcacaaatttatactactttttgctgtatttgatgaagggaaaagttggcactcagaaacaaagaactccttgatgcaggatagggatgctgcatctgctcgggcctggcctaaaatgcacacagtcaatggttatgtaaacaggtctctgccaggtctgattggatgccacaggaaatcagtctattggcatgtgattggaatgggcaccactcctgaagtgcactcaatattcctcgaaggtcacacatttcttgtgaggaaccatcgccaggctagcttggaaatctcgccaataactttccttactgctcaaacactcttgatggaccttggacagtttctactgttttgtcatatctcttcccaccaacatgatggcatggaagcttatgtcaaagtagacagctgtccagaggaaccccaactacgaatgaaaaataatgaagaagcggaagactatgatgatgatcttactgattctgaaatggatgtggtcaggtttgatgatgacaactctccttcctttatccaaattcgctcagttgccaagaagcatcctaaaacttgggtacattacattgctgctgaagaggaggactgggactatgctcccttagtcctcgcccccgatgacagaagttataaaagtcaatatttgaacaatggccctcagcggattggtaggaagtacaaaaaagtccgatttatggcatacacagatgaaacctttaagactcgtgaagctattcagcatgaatcaggaatcttgggacctttactttatggggaagttggagacacactgttgattatatttaagaatcaagcaagcagaccatataacatctaccctcacggaatcactgatgtccgtcctttgtattcaaggagattaccaaaaggtgtaaaacatttgaaggattttccaattctgccaggagaaatattcaaatataaatggacagtgactgtagaagatgggccaactaaatcagatcctcggtgcctgacccgctattactctagtttcgttaatatggagagagatctagcttcaggactcattggccctctcctcatctgctacaaagaatctgtagatcaaagaggaaaccagataatgtcagacaagaggaatgtcatcctgttttctgtatttgatgagaaccgaagctggtacctcacagagaatatacaacgctttctccccaatccagctggagtgcagcttgaggatccagagttccaagcctccaacatcatgcacagcatcaatggctatgtttttgatagtttgcagttgtcagtttgtttgcatgaggtggcatactggtacattctaagcattggagcacagactgacttcctttctgtcttcttctctggatataccttcaaacacaaaatggtctatgaagacacactcaccctattcccattctcaggagaaactgtcttcatgtcgatggaaaacccaggtctatggattctggggtgccacaactcagactttcggaacagaggcatgaccgccttactgaaggtttctagttgtgacaagaacactggtgattattacgaggacagttatgaagatatttcagcatacttgctgagtaaaaacaatgccattgaaccaagaagcttctctcaaaacggcgcgccaagtcccgctggaagcccaactagcaccgaagaggggacctcagagtccgccacccccgagtccggccctggctctgagcctgccactagcggctccgagactcctggcacatccgaaagcgctacacccgagagtggacccggcacctctaccgagcccagtgagggctccgcccctggaacaagcaccgagcccagcgaaggcagcgccccagggacctccacagagcccagtgaaggcagtgctcctggcaccagcaccgaaccaagcgagggctctgcacccgggacctccaccgagccaagcgaaggctctgcccctggcacttccaccgagcccagcgaaggcagcgcccctgggagccccgctggctctcccaccagcactgaggagggcacatctaccgaaccaagtgaaggctctgcaccaggtgcctcgagcccaccagtcttgaaacgccatcaagctgaaataactcgtactactcttcagtcagatcaagaggaaatcgattatgatgataccatatcagttgaaatgaagaaggaagattttgacatttatgatgaggatgaaaatcagagcccccgcagctttcaaaagaaaacacgacactattttattgctgcagtggagaggctctgggattatgggatgagtagctccccacatgttctaagaaacagggctcagggcgcgccaggtacacccggatcgggtacagcgtcatcgagccccggtgcgtcacctggtacgtcgagcacggggtcgccaggggcgtcccctgggacgtcctcaacaggctcgcccggtgcgtcacccggcacgtcgtccacgggttcacctggtagctccccttccgcgtccactggcaccgggcctggaactccggggagcggcacagcgagctcgtcgccgggagcatcgcctgggacatcgagcaccgggtcgccaggagcatcgcccggaacatccagcacaggaagccccggcgcgtcgcccgggacatcaagcacaggttccccgggatcgagcacgccgtccggagccactggatcaccagggagctcgacaccttccggcgcaacgggatcgcccggagccagcccgggtacgtcaagcactggctcccctgcctcgagcagggctcagagtggcagtgtccctcagttcaagaaagttgttttccaggaatttactgatggctcctttactcagcccttataccgtggagaactaaatgaacatttgggactcctggggccatatataagagcagaagttgaagataatatcatggtaactttcagaaatcaggcctctcgtccctattccttctattctagccttatttcttatgaggaagatcagaggcaaggagcagaacctagaaaaaactttgtcaagcctaatgaaaccaaaacttacttttggaaagtgcaacatcatatggcacccactaaagatgagtttgactgcaaagcctgggcttatttctctgatgttgacctggaaaaagatgtgcactcaggcctgattggaccccttctggtctgccacactaacacactgaaccctgctcatgggagacaagtgacagtacaggaatttgctctgtttttcaccatctttgatgagaccaaaagctggtacttcactgaaaatatggaaagaaactgcagggctccctgcaatatccagatggaagatcccggcgcgccatctccagccgggtccccaacttcgaccgaggaagggacctccgagtcagctaccccggagtccggtcctggcacctccaccgaaccatcggagggcagcgcccctgggagccctgccgggagccctacaagcaccgaagagggcaccagtacagagccaagtgaggggagcgcccctggtactagtactgaaccatccgaggggtcagctccaggcacgagtgagtccgctacccccgagagcggaccgggctcagagcccgccacgagtggcagtgaaactccaggctcagaacccgccactagtgggtcagagactccaggcagccctgccggatcccctacgtccaccgaggagggaacatctgagtccgcaacacccgaatccggtccaggcacctccacggaacctagtgaaggctcggcaccaggtgcctcgagcacttttaaagagaattatcgcttccatgcaatcaatggctacataatggatacactacctggcttagtaatggctcaggatcaaaggattcgatggtatctgctcagcatgggcagcaatgaaaacatccattctattcatttcagtggacatgtgttcactgtacgaaaaaaagaggagtataaaatggcactgtacaatctctatccaggtgtttttgagacagtggaaatgttaccatccaaagctggaatttggcgggtggaatgccttattggcgagcatctacatgctgggatgagcacactttttctggtgtacagcaataagtgtcagactcccctgggaatggcttctggacacattagagattttcagattacagcttcaggacaatatggacagtgggccccaaagctggccagacttcattattccggatcaatcaatgcctggagcaccaaggagcccttttcttggatcaaggtggatctgttggcaccaatgattattcacggcatcaagacccagggtgcccgtcagaagttctccagcctctacatctctcagtttatcatcatgtatagtcttgatgggaagaagtggcagacttatcgaggaaattccactggaaccttaatggtcttctttggcaatgtggattcatctgggataaaacacaatatttttaaccctccaattattgctcgatacatccgtttgcacccaactcattatagcattcgcagcactcttcgcatggagttgatgggctgtgatttaaatagttgcagcatgccattgggaatggagagtaaagcaatatcagatgcacagattactgcttcatcctactttaccaatatgtttgccacctggtctccttcaaaagctcgacttcacctccaagggaggagtaatgcctggagacctcaggtgaataatccaaaagagtggctgcaagtggacttccagaagacaatgaaagtcacaggagtaactactcagggagtaaaatctctgcttaccagcatgtatgtgaaggagttcctcatctccagcagtcaagatggccatcagtggactctcttttttcagaatggcaaagtaaaggtttttcagggaaatcaagactccttcacacctgtggtgaactctctagacccaccgttactgactcgctaccttcgaattcacccccagagttgggtgcaccagattgccctgaggatggaggttctgggctgcgaggcacaggacctctacggcgcgccaggtacctcagagtctgctacccccgagtcagggccaggatcagagccagccacctccgggtctgagacacccgggacttccgagagtgccacccctgagtccggacccgggtccgagcccgccacttccggctccgaaactcccggcacaagcgagagcgctaccccagagtcaggaccaggaacatctacagagccctctgaaggctccgctccagggtccccagccggcagtcccactagcaccgaggagggaacctctgaaagcgccacacccgaatcagggccagggtctgagcctgctaccagcggcagcgagacaccaggcacctctgagtccgccacaccagagtccggacccggatctcccgctgggagccccacctccactgaggagggatctcctgctggctctccaacatctactgaggaaggtacctcaaccgagccatccgagggatcagctcccggcacctcagagtcggcaaccccggagtctggacccggaacttccgaaagtgccacaccagagtccggtcccgggacttcagaatcagcaacacccgagtccggccctgggtctgaacccgccacaagtggtagtgagacaccaggatcagaacctgctacctcagggtcagagacacccggatctccggcaggctcaccaacctccactgaggagggcaccagcacagaaccaagcgagggctccgcacccggaacaagcactgaacccagtgagggttcagcacccggctctgagccggccacaagtggcagtgagacacccggcacttcagagagtgccacccccgagagtggcccaggcactagtaccgagccctctgaaggcagtgcgccagcctcgagcgaacaaaaactcatctcagaagaggatctgtcacctgcaaccggtcatcatcaccatcaccattga

SEQ ID NO: 1345 - protein, 2206 aa, synthetic construct
  REGION 1..2206: note = Description of Artificial Sequence: Synthetic polypeptide
ATRRYYLGAVELSWDYMQSDLGELPVDARFPPRVPKSFPFNTSVVYKKTLFVEFTDHLFNIAKPRPPWMGLLGPTIQAEVYDTVVITLKNMASHPVSLHAVGVSYWKASEGAEYDDQTSQREKEDDKVFPGGSHTYVWQVLKENGPMASDPLCLTYSYLSHVDLVKDLNSGLIGALLVCREGSLAKEKTQTLHKFILLFAVFDEGKSWHSETKNSLMQDRDAASARAWPKMHTVNGYVNRSLPGLIGCHRKSVYWHVIGMGTTPEVHSIFLEGHTFLVRNHRQASLEISPITFLTAQTLLMDLGQFLLFCHISSHQHDGMEAYVKVDSCPEEPQLRMKNNEEAEDYDDDLTDSEMDVVRFDDDNSPSFIQIRSVAKKHPKTWVHYIAAEEEDWDYAPLVLAPDDRSYKSQYLNNGPQRIGRKYKKVRFMAYTDETFKTREAIQHESGILGPLLYGEVGDTLLIIFKNQASRPYNIYPHGITDVRPLYSRRLPKGVKHLKDFPILPGEIFKYKWTVTVEDGPTKSDPRCLTRYYSSFVNMERDLASGLIGPLLICYKESVDQRGNQIMSDKRNVILFSVFDENRSWYLTENIQRFLPNPAGVQLEDPEFQASNIMHSINGYVFDSLQLSVCLHEVAYWYILSIGAQTDFLSVFFSGYTFKHKMVYEDTLTLFPFSGETVFMSMENPGLWILGCHNSDFRNRGMTALLKVSSCDKNTGDYYEDSYEDISAYLLSKNNAIEPRSFSQNGAPSPAGSPTSTEEGTSESATPESGPGSEPATSGSETPGTSESATPESGPGTSTEPSEGSAPGTSTEPSEGSAPGTSTEPSEGSAPGTSTEPSEGSAPGTSTEPSEGSAPGTSTEPSEGSAPGSPAGSPTSTEEGTSTEPSEGSAPGASSPPVLKRHQAEITRTTLQSDQEEIDYDDTISVEMKKEDFDIYDEDENQSPRSFQKKTRHYFIAAVERLWDYGMSSSPHVLRNRAQGAPGTPGSGTASSSPGASPGTSSTGSPGASPGTSSTGSPGASPGTSSTGSPGSSPSASTGTGPGTPGSGTASSSPGASPGTSSTGSPGASPGTSSTGSPGASPGTSSTGSPGSSTPSGATGSPGSSTPSGATGSPGASPGTSSTGSPASSRAQSGSVPQFKKVVFQEFTDGSFTQPLYRGELNEHLGLLGPYIRAEVEDNIMVTFRNQASRPYSFYSSLISYEEDQRQGAEPRKNFVKPNETKTYFWKVQHHMAPTKDEFDCKAWAYFSDVDLEKDVHSGLIGPLLVCHTNTLNPAHGRQVTVQEFALFFTIFDETKSWYFTENMERNCRAPCNIQMEDPGAPGTPGSGTASSSPGASPGTSSTGSPGASPGTSSTGSPGASPGTSSTGSPGSSPSASTGTGPGTPGSGTASSSPGASPGTSSTGSPGASPGTSSTGSPGASPGTSSTGSPGSSTPSGATGSPGSSTPSGATGSPGASPGTSSTGSPASSTFKENYRFHAINGYIMDTLPGLVMAQDQRIRWYLLSMGSNENIHSIHFSGHVFTVRKKEEYKMALYNLYPGVFETVEMLPSKAGIWRVECLIGEHLHAGMSTLFLVYSNKCQTPLGMASGHIRDFQITASGQYGQWAPKLARLHYSGSINAWSTKEPFSWIKVDLLAPMIIHGIKTQGARQKFSSLYISQFIIMYSLDGKKWQTYRGNSTGTLMVFFGNVDSSGIKHNIFNPPIIARYIRLHPTHYSIRSTLRMELMGCDLNSCSMPLGMESKAISDAQITASSYFTNMFATWSPSKARLHLQGRSNAWRPQVNNPKEWLQVDFQKTMKVTGVTTQGVKSLLTSMYVKEFLISSSQDGHQWTLFFQNGKVKVFQGNQDSFTPVVNSLDPPLLTRYLRIHPQSWVHQIALRMEVLGCEAQDLYGAPGTSESATPESGPGSEPATSGSETPGTSESATPESGPGSEPATSGSETPGTSESATPESGPGTSTEPSEGSAPGSPAGSPTSTEEGTSESATPESGPGSEPATSGSETPGTSESATPESGPGSPAGSPTSTEEGSPAGSPTSTEEGTSTEPSEGSAPGTSESATPESGPGTSESATPESGPGTSESATPESGPGSEPATSGSETPGSEPATSGSETPGSPAGSPTSTEEGTSTEPSEGSAPGTSTEPSEGSAPGSEPATSGSETPGTSESATPESGPGTSTEPSEGSAPASSEQKLISEEDLSPATGHHHHHH

SEQ ID NO: 1346 - DNA, 6621 bp, synthetic construct
  misc_feature 1..6621: note = Description of Artificial Sequence: Synthetic polynucleotide
  source 1..6621: mol_type = other DNA
gccaccagaagatactacctgggtgcagtggaactgtcatgggactatatgcaaagtgatctcggtgagctgcctgtggacgcaagatttcctcctagagtgccaaaatcttttccattcaacacctcagtcgtgtacaaaaagactctgtttgtagaattcacggatcaccttttcaacatcgctaagccaaggccaccctggatgggtctgctaggtcctaccatccaggctgaggtttatgatacagtggtcattacacttaagaacatggcttcccatcctgtcagtcttcatgctgttggtgtatcctactggaaagcttctgagggagctgaatatgatgatcagaccagtcaaagggagaaagaagatgataaagtcttccctggtggaagccatacatatgtctggcaggtcctgaaagagaatggtccaatggcctctgacccactgtgccttacctactcatatctttctcatgtggacctggtaaaagacttgaattcaggcctcattggagccctactagtatgtagagaagggagtctggccaaggaaaagacacagaccttgcacaaatttatactactttttgctgtatttgatgaagggaaaagttggcactcagaaacaaagaactccttgatgcaggatagggatgctgcatctgctcgggcctggcctaaaatgcacacagtcaatggttatgtaaacaggtctctgccaggtctgattggatgccacaggaaatcagtctattggcatgtgattggaatgggcaccactcctgaagtgcactcaatattcctcgaaggtcacacatttcttgtgaggaaccatcgccaggctagcttggaaatctcgccaataactttccttactgctcaaacactcttgatggaccttggacagtttctactgttttgtcatatctcttcccaccaacatgatggcatggaagcttatgtcaaagtagacagctgtccagaggaaccccaactacgaatgaaaaataatgaagaagcggaagactatgatgatgatcttactgattctgaaatggatgtggtcaggtttgatgatgacaactctccttcctttatccaaattcgctcagttgccaagaagcatcctaaaacttgggtacattacattgctgctgaagaggaggactgggactatgctcccttagtcctcgcccccgatgacagaagttataaaagtcaatatttgaacaatggccctcagcggattggtaggaagtacaaaaaagtccgatttatggcatacacagatgaaacctttaagactcgtgaagctattcagcatgaatcaggaatcttgggacctttactttatggggaagttggagacacactgttgattatatttaagaatcaagcaagcagaccatataacatctaccctcacggaatcactgatgtccgtcctttgtattcaaggagattaccaaaaggtgtaaaacatttgaaggattttccaattctgccaggagaaatattcaaatataaatggacagtgactgtagaagatgggccaactaaatcagatcctcggtgcctgacccgctattactctagtttcgttaatatggagagagatctagcttcaggactcattggccctctcctcatctgctacaaagaatctgtagatcaaagaggaaaccagataatgtcagacaagaggaatgtcatcctgttttctgtatttgatgagaaccgaagctggtacctcacagagaatatacaacgctttctccccaatccagctggagtgcagcttgaggatccagagttccaagcctccaacatcatgcacagcatcaatggctatgtttttgatagtttgcagttgtcagtttgtttgcatgaggtggcatactggtacattctaagcattggagcacagactgacttcctttctgtcttcttctctggatataccttcaaacacaaaatggtctatgaagacacactcaccctattcccattctcaggagaaactgtcttcatgtcgatggaaaacccaggtctatggattctggggtgccacaactcagactttcggaacagaggcatgaccgccttactgaaggtttctagttgtgacaagaacactggtgattattacgaggacagttatgaagatatttcagcatacttgctgagtaaaaacaatgccattgaaccaagaagcttctctcaaaacggcgcgccaagtcccgctggaagcccaactagcaccgaagaggggacctcagagtccgccacccccgagtccggccctggctctgagcctgccactagcggctccgagactcctggcacatccgaaagcgctacacccgagagtggacccggcacctctaccgagcccagtgagggctccgcccctggaacaagcaccgagcccagcgaaggcagcgccccagggacctccacagagcccagtgaaggcagtgctcctggcaccagcaccgaaccaagcgagggctctgcacccgggacctccaccgagccaagcgaaggctctgcccctggcacttccaccgagcccagcgaaggcagcgcccctgggagccccgctggctctcccaccagcactgaggagggcacatctaccgaaccaagtgaaggctctgcaccaggtgcctcgagcccaccagtcttgaaacgccatcaagctgaaataactcgtactactcttcagtcagatcaagaggaaatcgattatgatgataccatatcagttgaaatgaagaaggaagattttgacatttatgatgaggatgaaaatcagagcccccgcagctttcaaaagaaaacacgacactattttattgctgcagtggagaggctctgggattatgggatgagtagctccccacatgttctaagaaacagggctcagggcgcgccaggtacacccggatcgggtacagcgtcatcgagccccggtgcgtcacctggtacgtcgagcacggggtcgccaggggcgtcccctgggacgtcctcaacaggctcgcccggtgcgtcacccggcacgtcgtccacgggttcacctggtagctccccttccgcgtccactggcaccgggcctggaactccggggagcggcacagcgagctcgtcgccgggagcatcgcctgggacatcgagcaccgggtcgccaggagcatcgcccggaacatccagcacaggaagccccggcgcgtcgcccgggacatcaagcacaggttccccgggatcgagcacgccgtccggagccactggatcaccagggagctcgacaccttccggcgcaacgggatcgcccggagccagcccgggtacgtcaagcactggctcccctgcctcgagcagggctcagagtggcagtgtccctcagttcaagaaagttgttttccaggaatttactgatggctcctttactcagcccttataccgtggagaactaaatgaacatttgggactcctggggccatatataagagcagaagttgaagataatatcatggtaactttcagaaatcaggcctctcgtccctattccttctattctagccttatttcttatgaggaagatcagaggcaaggagcagaacctagaaaaaactttgtcaagcctaatgaaaccaaaacttacttttggaaagtgcaacatcatatggcacccactaaagatgagtttgactgcaaagcctgggcttatttctctgatgttgacctggaaaaagatgtgcactcaggcctgattggaccccttctggtctgccacactaacacactgaaccctgctcatgggagacaagtgacagtacaggaatttgctctgtttttcaccatctttgatgagaccaaaagctggtacttcactgaaaatatggaaagaaactgcagggctccctgcaatatccagatggaagatcccggcgcgccaggtacacccggatcgggtacagcgtcatcgagccccggtgcgtcacctggtacgtcgagcacggggtcgccaggggcgtcccctgggacgtcctcaacaggctcgcccggtgcgtcacccggcacgtcgtccacgggttcacctggtagctccccttccgcgtccactggcaccgggcctggaactccggggagcggcacagcgagctcgtcgccgggagcatcgcctgggacatcgagcaccgggtcgccaggagcatcgcccggaacatccagcacaggaagccccggcgcgtcgcccgggacatcaagcacaggttccccgggatcgagcacgccgtccggagccactggatcaccagggagctcgacaccttccggcgcaacgggatcgcccggagccagcccgggtacgtcaagcactggctcccctgcctcgagcacttttaaagagaattatcgcttccatgcaatcaatggctacataatggatacactacctggcttagtaatggctcaggatcaaaggattcgatggtatctgctcagcatgggcagcaatgaaaacatccattctattcatttcagtggacatgtgttcactgtacgaaaaaaagaggagtataaaatggcactgtacaatctctatccaggtgtttttgagacagtggaaatgttaccatccaaagctggaatttggcgggtggaatgccttattggcgagcatctacatgctgggatgagcacactttttctggtgtacagcaataagtgtcagactcccctgggaatggcttctggacacattagagattttcagattacagcttcaggacaatatggacagtgggccccaaagctggccagacttcattattccggatcaatcaatgcctggagcaccaaggagcccttttcttggatcaaggtggatctgttggcaccaatgattattcacggcatcaagacccagggtgcccgtcagaagttctccagcctctacatctctcagtttatcatcatgtatagtcttgatgggaagaagtggcagacttatcgaggaaattccactggaaccttaatggtcttctttggcaatgtggattcatctgggataaaacacaatatttttaaccctccaattattgctcgatacatccgtttgcacccaactcattatagcattcgcagcactcttcgcatggagttgatgggctgtgatttaaatagttgcagcatgccattgggaatggagagtaaagcaatatcagatgcacagattactgcttcatcctactttaccaatatgtttgccacctggtctccttcaaaagctcgacttcacctccaagggaggagtaatgcctggagacctcaggtgaataatccaaaagagtggctgcaagtggacttccagaagacaatgaaagtcacaggagtaactactcagggagtaaaatctctgcttaccagcatgtatgtgaaggagttcctcatctccagcagtcaagatggccatcagtggactctcttttttcagaatggcaaagtaaaggtttttcagggaaatcaagactccttcacacctgtggtgaactctctagacccaccgttactgactcgctaccttcgaattcacccccagagttgggtgcaccagattgccctgaggatggaggttctgggctgcgaggcacaggacctctacggcgcgccaggtacctcagagtctgctacccccgagtcagggccaggatcagagccagccacctccgggtctgagacacccgggacttccgagagtgccacccctgagtccggacccgggtccgagcccgccacttccggctccgaaactcccggcacaagcgagagcgctaccccagagtcaggaccaggaacatctacagagccctctgaaggctccgctccagggtccccagccggcagtcccactagcaccgaggagggaacctctgaaagcgccacacccgaatcagggccagggtctgagcctgctaccagcggcagcgagacaccaggcacctctgagtccgccacaccagagtccggacccggatctcccgctgggagccccacctccactgaggagggatctcctgctggctctccaacatctactgaggaaggtacctcaaccgagccatccgagggatcagctcccggcacctcagagtcggcaaccccggagtctggacccggaacttccgaaagtgccacaccagagtccggtcccgggacttcagaatcagcaacacccgagtccggccctgggtctgaacccgccacaagtggtagtgagacaccaggatcagaacctgctacctcagggtcagagacacccggatctccggcaggctcaccaacctccactgaggagggcaccagcacagaaccaagcgagggctccgcacccggaacaagcactgaacccagtgagggttcagcacccggctctgagccggccacaagtggcagtgagacacccggcacttcagagagtgccacccccgagagtggcccaggcactagtaccgagccctctgaaggcagtgcgccagcctcgagcgaacaaaaactcatctcagaagaggatctgtcacctgcaaccggtcatcatcaccatcaccattga

SEQ ID NO: 1347 - protein, 2203 aa, synthetic construct
  REGION 1..2203: note = Description of Artificial Sequence: Synthetic polypeptide
ATRRYYLGAVELSWDYMQGAPGSSPSASTGTGPGSSPSASTGTGPGASPGTSSTGSPGASPGTSSTGSPGSSTPSGATGSPGSSPSASTGTGPGASPGTSSTGSPGSSPSASTGTGPGTPGSGTASSSPGSSTPSGATGSPGSSTPSGATGSPGASPGTSSTGSPASSSDLGELPVDARFPPRVPKSFPFNTSVVYKKTLFVEFTDHLFNIAKPRPPWMGLLGPTIQAEVYDTVVITLKNMASHPVSLHAVGVSYWKASEGAEYDDQTSQREKEDDKVFPGGSHTYVWQVLKENGPMASDPLCLTYSYLSHVDLVKDLNSGLIGALLVCREGSLAKEKTQTLHKFILLFAVFDEGKSWHSETKNSLMQDRDAASARAWPKMHTVNGYVNRSLPGLIGCHRKSVYWHVIGMGTTPEVHSIFLEGHTFLVRNHRQASLEISPITFLTAQTLLMDLGQFLLFCHISSHQHDGMEAYVKVDSCPEEPQLRMKNNEEAEDYDDDLTDSEMDVVRFDDDNSPSFIQIRSVAKKHPKTWVHYIAAEEEDWDYAPLVLAPDGAPGASPGTSSTGSPGSSPSASTGTGPGSSPSASTGTGPGTPGSGTASSSPGSSTPSGATGSPGSSPSASTGTGPGASPGTSSTGSPGTPGSGTASSSPGSSTPSGATGSPGTPGSGTASSSPGASPGTSSTGSPGASPGTSSTGSPASSDRSYKSQYLNNGPQRIGRKYKKVRFMAYTDETFKTREAIQHESGILGPLLYGEVGDTLLIIFKNQASRPYNIYPHGITDVRPLYSRRLPKGVKHLKDFPILPGEIFKYKWTVTVEDGPTKSDPRCLTRYYSSFVNMERDLASGLIGPLLICYKESVDQRGNQIMSDKRNVILFSVFDENRSWYLTENIQRFLPNPAGVQLEDPEFQASNIMHSINGYVFDSLQLSVCLHEVAYWYILSIGAQTDFLSVFFSGYTFKHKMVYEDTLTLFPFSGETVFMSMENPGLWILGCHNSDFRNRGMTALLKVSSCDKNTGDYYEDSYEDISAYLLSKNNAIEPRSFSQNGAPSPAGSPTSTEEGTSESATPESGPGSEPATSGSETPGTSESATPESGPGTSTEPSEGSAPGTSTEPSEGSAPGTSTEPSEGSAPGTSTEPSEGSAPGTSTEPSEGSAPGTSTEPSEGSAPGSPAGSPTSTEEGTSTEPSEGSAPGASSPPVLKRHQAEITRTTLQSDQEEIDYDDTISVEMKKEDFDIYDEDENQSPRSFQKKTRHYFIAAVERLWDYGMSSSPHVLRNRAQSGSVPQFKKVVFQEFTDGSFTQPLYRGELNEHLGLLGPYIRAEVEDNIMVTFRNQASRPYSFYSSLISYEEDQRQGAEPRKNFVKPNETKTYFWKVQHHMAPTKDEFDCKAWAYFSDVDLEKDVHSGLIGPLLVCHTNTLNPAHGRQVTVQEFALFFTIFDETKSWYFTENMERNCRAPCNIQMEDPTFKENYRFHAINGYIMDTLPGLVMAQDQRIRWYLLSMGSNENIHSIHFSGHVFTVRKKEEYKMALYNLYPGVFETVEMLPSKAGIWRVECLIGEHLHAGMSTLFLVYSNKCQTPLGMASGHIRDFQITASGQYGQWAPKLARLHYSGSINAWSTKEPFSWIKVDLLAPMIIHGIKTQGARQKFSSLYISQFIIMYSLDGKKWQTYRGNSTGTLMVFFGNVDSSGIKHNIFNPPIIARYIRLHPTHYSIRSTLRMELMGCDLNSCSMPLGMESKAISDAQITASSYFTNMFATWSPSKARLHLQGRSNAWRPQVNNPKEWLQVDFQKTMKVTGVTTQGVKSLLTSMYVKEFLISSSQDGHQWTLFFQNGKVKVFQGNQDSFTPVVNSLDPPLLTRYLRIHPQSWVHQIALRMEVLGCEAQDLYGAPGTSESATPESGPGSEPATSGSETPGTSESATPESGPGSEPATSGSETPGTSESATPESGPGTSTEPSEGSAPGSPAGSPTSTEEGTSESATPESGPGSEPATSGSETPGTSESATPESGPGSPAGSPTSTEEGSPAGSPTSTEEGTSTEPSEGSAPGTSESATPESGPGTSESATPESGPGTSESATPESGPGSEPATSGSETPGSEPATSGSETPGSPAGSPTSTEEGTSTEPSEGSAPGTSTEPSEGSAPGSEPATSGSETPGTSESATPESGPGTSTEPSEGSAPASSEQKLISEEDLSPATGHHHHHH

SEQ ID NO: 1348 - DNA, 6612 bp, synthetic construct
  misc_feature 1..6612: note = Description of Artificial Sequence: Synthetic polynucleotide
  source 1..6612: mol_type = other DNA
gccaccagaagatactacctgggtgcagtggaactgtcatgggactatatgcaaggcgcgccaggctccagcccctccgcgagcacgggaaccggaccaggttcgtcaccctcagcatcaacggggacgggaccgggggcgtcaccaggaacgtcctccaccggctcgccgggtgcatcacccggaacgtcatcgaccggatcgccagggagctcgacgccatcaggcgcaacaggatcacctggctcaagccctagcgcgtcaaccggcacgggtccgggtgcctcccctggcacgtccagcaccggatcacccggatcgagcccatccgcctcaaccggaaccggacccggtacaccagggtcgggaacagcctcctcgtcaccaggctcctcaaccccctcgggagccacgggttcgcccggttcgtcaacgccttccggagcaactggtagccccggagcatcgccaggaacttcgagcacggggtcgcccgcctcgagcagtgatctcggtgagctgcctgtggacgcaagatttcctcctagagtgccaaaatcttttccattcaacacctcagtcgtgtacaaaaagactctgtttgtagaattcacggatcaccttttcaacatcgctaagccaaggccaccctggatgggtctgctaggtcctaccatccaggctgaggtttatgatacagtggtcattacacttaagaacatggcttcccatcctgtcagtcttcatgctgttggtgtatcctactggaaagcttctgagggagctgaatatgatgatcagaccagtcaaagggagaaagaagatgataaagtcttccctggtggaagccatacatatgtctggcaggtcctgaaagagaatggtccaatggcctctgacccactgtgccttacctactcatatctttctcatgtggacctggtaaaagacttgaattcaggcctcattggagccctactagtatgtagagaagggagtctggccaaggaaaagacacagaccttgcacaaatttatactactttttgctgtatttgatgaagggaaaagttggcactcagaaacaaagaactccttgatgcaggatagggatgctgcatctgctcgggcctggcctaaaatgcacacagtcaatggttatgtaaacaggtctctgccaggtctgattggatgccacaggaaatcagtctattggcatgtgattggaatgggcaccactcctgaagtgcactcaatattcctcgaaggtcacacatttcttgtgaggaaccatcgccaggctagcttggaaatctcgccaataactttccttactgctcaaacactcttgatggaccttggacagtttctactgttttgtcatatctcttcccaccaacatgatggcatggaagcttatgtcaaagtagacagctgtccagaggaaccccaactacgaatgaaaaataatgaagaagcggaagactatgatgatgatcttactgattctgaaatggatgtggtcaggtttgatgatgacaactctccttcctttatccaaattcgctcagttgccaagaagcatcctaaaacttgggtacattacattgctgctgaagaggaggactgggactatgctcccttagtcctcgcccccgatggcgcgccaggtgcctcgccgggaacatcatcaactggttcacccgggtcatccccctcggcctcaaccgggacgggtcccggctcatcccccagcgccagcactggaacaggtcctggcactcctggttccggtacggcatcgtcatccccgggaagctcaacaccgtccggagcgacaggatcacctggctcgtcaccttcggcgtcaactggaacggggccaggggcctcacccggaacgtcctcgactgggtcgcctggtacgccgggatcaggaacggcctcatcctcgcctgggtcctcaacgccctcgggtgcgactggttcgccgggaactcctggctcggggacggcctcgtcgtcgcctggggcatcaccggggacgagctccacggggtcccctggagcgtcaccggggacctcctcgacaggtagcccggcctcgagcgacagaagttataaaagtcaatatttgaacaatggccctcagcggattggtaggaagtacaaaaaagtccgatttatggcatacacagatgaaacctttaagactcgtgaagctattcagcatgaatcaggaatcttgggacctttactttatggggaagttggagacacactgttgattatatttaagaatcaagcaagcagaccatataacatctaccctcacggaatcactgatgtccgtcctttgtattcaaggagattaccaaaaggtgtaaaacatttgaaggattttccaattctgccaggagaaatattcaaatataaatggacagtgactgtagaagatgggccaactaaatcagatcctcggtgcctgacccgctattactctagtttcgttaatatggagagagatctagcttcaggactcattggccctctcctcatctgctacaaagaatctgtagatcaaagaggaaaccagataatgtcagacaagaggaatgtcatcctgttttctgtatttgatgagaaccgaagctggtacctcacagagaatatacaacgctttctccccaatccagctggagtgcagcttgaggatccagagttccaagcctccaacatcatgcacagcatcaatggctatgtttttgatagtttgcagttgtcagtttgtttgcatgaggtggcatactggtacattctaagcattggagcacagactgacttcctttctgtcttcttctctggatataccttcaaacacaaaatggtctatgaagacacactcaccctattcccattctcaggagaaactgtcttcatgtcgatggaaaacccaggtctatggattctggggtgccacaactcagactttcggaacagaggcatgaccgccttactgaaggtttctagttgtgacaagaacactggtgattattacgaggacagttatgaagatatttcagcatacttgctgagtaaaaacaatgccattgaaccaagaagcttctctcaaaacggcgcgccaagtcccgctggaagcccaactagcaccgaagaggggacctcagagtccgccacccccgagtccggccctggctctgagcctgccactagcggctccgagactcctggcacatccgaaagcgctacacccgagagtggacccggcacctctaccgagcccagtgagggctccgcccctggaacaagcaccgagcccagcgaaggcagcgccccagggacctccacagagcccagtgaaggcagtgctcctggcaccagcaccgaaccaagcgagggctctgcacccgggacctccaccgagccaagcgaaggctctgcccctggcacttccaccgagcccagcgaaggcagcgcccctgggagccccgctggctctcccaccagcactgaggagggcacatctaccgaaccaagtgaaggctctgcaccaggtgcctcgagcccaccagtcttgaaacgccatcaagctgaaataactcgtactactcttcagtcagatcaagaggaaatcgattatgatgataccatatcagttgaaatgaagaaggaagattttgacatttatgatgaggatgaaaatcagagcccccgcagctttcaaaagaaaacacgacactattttattgctgcagtggagaggctctgggattatgggatgagtagctccccacatgttctaagaaacagggctcagagtggcagtgtccctcagttcaagaaagttgttttccaggaatttactgatggctcctttactcagcccttataccgtggagaactaaatgaacatttgggactcctggggccatatataagagcagaagttgaagataatatcatggtaactttcagaaatcaggcctctcgtccctattccttctattctagccttatttcttatgaggaagatcagaggcaaggagcagaacctagaaaaaactttgtcaagcctaatgaaaccaaaacttacttttggaaagtgcaacatcatatggcacccactaaagatgagtttgactgcaaagcctgggcttatttctctgatgttgacctggaaaaagatgtgcactcaggcctgattggaccccttctggtctgccacactaacacactgaaccctgctcatgggagacaagtgacagtacaggaatttgctctgtttttcaccatctttgatgagaccaaaagctggtacttcactgaaaatatggaaagaaactgcagggctccctgcaatatccagatggaagatcccacttttaaagagaattatcgcttccatgcaatcaatggctacataatggatacactacctggcttagtaatggctcaggatcaaaggattcgatggtatctgctcagcatgggcagcaatgaaaacatccattctattcatttcagtggacatgtgttcactgtacgaaaaaaagaggagtataaaatggcactgtacaatctctatccaggtgtttttgagacagtggaaatgttaccatccaaagctggaatttggcgggtggaatgccttattggcgagcatctacatgctgggatgagcacactttttctggtgtacagcaataagtgtcagactcccctgggaatggcttctggacacattagagattttcagattacagcttcaggacaatatggacagtgggccccaaagctggccagacttcattattccggatcaatcaatgcctggagcaccaaggagcccttttcttggatcaaggtggatctgttggcaccaatgattattcacggcatcaagacccagggtgcccgtcagaagttctccagcctctacatctctcagtttatcatcatgtatagtcttgatgggaagaagtggcagacttatcgaggaaattccactggaaccttaatggtcttctttggcaatgtggattcatctgggataaaacacaatatttttaaccctccaattattgctcgatacatccgtttgcacccaactcattatagcattcgcagcactcttcgcatggagttgatgggctgtgatttaaatagttgcagcatgccattgggaatggagagtaaagcaatatcagatgcacagattactgcttcatcctactttaccaatatgtttgccacctggtctccttcaaaagctcgacttcacctccaagggaggagtaatgcctggagacctcaggtgaataatccaaaagagtggctgcaagtggacttccagaagacaatgaaagtcacaggagtaactactcagggagtaaaatctctgcttaccagcatgtatgtgaaggagttcctcatctccagcagtcaagatggccatcagtggactctcttttttcagaatggcaaagtaaaggtttttcagggaaatcaagactccttcacacctgtggtgaactctctagacccaccgttactgactcgctaccttcgaattcacccccagagttgggtgcaccagattgccctgaggatggaggttctgggctgcgaggcacaggacctctacggcgcgccaggtacctcagagtctgctacccccgagtcagggccaggatcagagccagccacctccgggtctgagacacccgggacttccgagagtgccacccctgagtccggacccgggtccgagcccgccacttccggctccgaaactcccggcacaagcgagagcgctaccccagagtcaggaccaggaacatctacagagccctctgaaggctccgctccagggtccccagccggcagtcccactagcaccgaggagggaacctctgaaagcgccacacccgaatcagggccagggtctgagcctgctaccagcggcagcgagacaccaggcacctctgagtccgccacaccagagtccggacccggatctcccgctgggagccccacctccactgaggagggatctcctgctggctctccaacatctactgaggaaggtacctcaaccgagccatccgagggatcagctcccggcacctcagagtcggcaaccccggagtctggacccggaacttccgaaagtgccacaccagagtccggtcccgggacttcagaatcagcaacacccgagtccggccctgggtctgaacccgccacaagtggtagtgagacaccaggatcagaacctgctacctcagggtcagagacacccggatctccggcaggctcaccaacctccactgaggagggcaccagcacagaaccaagcgagggctccgcacccggaacaagcactgaacccagtgagggttcagcacccggctctgagccggccacaagtggcagtgagacacccggcacttcagagagtgccacccccgagagtggcccaggcactagtaccgagccctctgaaggcagtgcgccagcctcgagcgaacaaaaactcatctcagaagaggatctgtcacctgcaaccggtcatcatcaccatcaccattga

SEQ ID NO: 1349 - protein, 2203 aa, synthetic construct
  REGION 1..2203: note = Description of Artificial Sequence: Synthetic polypeptide
ATRRYYLGAVELSWDYMQGAPGSSPSASTGTGPGSSPSASTGTGPGASPGTSSTGSPGASPGTSSTGSPGSSTPSGATGSPGSSPSASTGTGPGASPGTSSTGSPGSSPSASTGTGPGTPGSGTASSSPGSSTPSGATGSPGSSTPSGATGSPGASPGTSSTGSPASSSDLGELPVDARFPPRVPKSFPFNTSVVYKKTLFVEFTDHLFNIAKPRPPWMGLLGPTIQAEVYDTVVITLKNMASHPVSLHAVGVSYWKASEGAEYDDQTSQREKEDDKVFPGGSHTYVWQVLKENGPMASDPLCLTYSYLSHVDLVKDLNSGLIGALLVCREGSLAKEKTQTLHKFILLFAVFDEGKSWHSETKNSLMQDRDAASARAWPKMHTVNGYVNRSLPGLIGCHRKSVYWHVIGMGTTPEVHSIFLEGHTFLVRNHRQASLEISPITFLTAQTLLMDLGQFLLFCHISSHQHDGMEAYVKVDSCPEEPQLRMKNNEEAEDYDDDLTDSEMDVVRFDDDNSPSFIQIRSVAKKHPKTWVHYIAAEEEDWDYAPLVLAPDDRSYKSGAPGASPGTSSTGSPGSSPSASTGTGPGSSPSASTGTGPGTPGSGTASSSPGSSTPSGATGSPGSSPSASTGTGPGASPGTSSTGSPGTPGSGTASSSPGSSTPSGATGSPGTPGSGTASSSPGASPGTSSTGSPGASPGTSSTGSPASSQYLNNGPQRIGRKYKKVRFMAYTDETFKTREAIQHESGILGPLLYGEVGDTLLIIFKNQASRPYNIYPHGITDVRPLYSRRLPKGVKHLKDFPILPGEIFKYKWTVTVEDGPTKSDPRCLTRYYSSFVNMERDLASGLIGPLLICYKESVDQRGNQIMSDKRNVILFSVFDENRSWYLTENIQRFLPNPAGVQLEDPEFQASNIMHSINGYVFDSLQLSVCLHEVAYWYILSIGAQTDFLSVFFSGYTFKHKMVYEDTLTLFPFSGETVFMSMENPGLWILGCHNSDFRNRGMTALLKVSSCDKNTGDYYEDSYEDISAYLLSKNNAIEPRSFSQNGAPSPAGSPTSTEEGTSESATPESGPGSEPATSGSETPGTSESATPESGPGTSTEPSEGSAPGTSTEPSEGSAPGTSTEPSEGSAPGTSTEPSEGSAPGTSTEPSEGSAPGTSTEPSEGSAPGSPAGSPTSTEEGTSTEPSEGSAPGASSPPVLKRHQAEITRTTLQSDQEEIDYDDTISVEMKKEDFDIYDEDENQSPRSFQKKTRHYFIAAVERLWDYGMSSSPHVLRNRAQSGSVPQFKKVVFQEFTDGSFTQPLYRGELNEHLGLLGPYIRAEVEDNIMVTFRNQASRPYSFYSSLISYEEDQRQGAEPRKNFVKPNETKTYFWKVQHHMAPTKDEFDCKAWAYFSDVDLEKDVHSGLIGPLLVCHTNTLNPAHGRQVTVQEFALFFTIFDETKSWYFTENMERNCRAPCNIQMEDPTFKENYRFHAINGYIMDTLPGLVMAQDQRIRWYLLSMGSNENIHSIHFSGHVFTVRKKEEYKMALYNLYPGVFETVEMLPSKAGIWRVECLIGEHLHAGMSTLFLVYSNKCQTPLGMASGHIRDFQITASGQYGQWAPKLARLHYSGSINAWSTKEPFSWIKVDLLAPMIIHGIKTQGARQKFSSLYISQFIIMYSLDGKKWQTYRGNSTGTLMVFFGNVDSSGIKHNIFNPPIIARYIRLHPTHYSIRSTLRMELMGCDLNSCSMPLGMESKAISDAQITASSYFTNMFATWSPSKARLHLQGRSNAWRPQVNNPKEWLQVDFQKTMKVTGVTTQGVKSLLTSMYVKEFLISSSQDGHQWTLFFQNGKVKVFQGNQDSFTPVVNSLDPPLLTRYLRIHPQSWVHQIALRMEVLGCEAQDLYGAPGTSESATPESGPGSEPATSGSETPGTSESATPESGPGSEPATSGSETPGTSESATPESGPGTSTEPSEGSAPGSPAGSPTSTEEGTSESATPESGPGSEPATSGSETPGTSESATPESGPGSPAGSPTSTEEGSPAGSPTSTEEGTSTEPSEGSAPGTSESATPESGPGTSESATPESGPGTSESATPESGPGSEPATSGSETPGSEPATSGSETPGSPAGSPTSTEEGTSTEPSEGSAPGTSTEPSEGSAPGSEPATSGSETPGTSESATPESGPGTSTEPSEGSAPASSEQKLISEEDLSPATGHHHHHH

SEQ ID NO: 1350 - DNA, 6612 bp, synthetic construct
  misc_feature 1..6612: note = Description of Artificial Sequence: Synthetic polynucleotide
  source 1..6612: mol_type = other DNA
gccaccagaagatactacctgggtgcagtggaactgtcatgggactatatgcaaggcgcgccaggctccagcccctccgcgagcacgggaaccggaccaggttcgtcaccctcagcatcaacggggacgggaccgggggcgtcaccaggaacgtcctccaccggctcgccgggtgcatcacccggaacgtcatcgaccggatcgccagggagctcgacgccatcaggcgcaacaggatcacctggctcaagccctagcgcgtcaaccggcacgggtccgggtgcctcccctggcacgtccagcaccggatcacccggatcgagcccatccgcctcaaccggaaccggacccggtacaccagggtcgggaacagcctcctcgtcaccaggctcctcaaccccctcgggagccacgggttcgcccggttcgtcaacgccttccggagcaactggtagccccggagcatcgccaggaacttcgagcacggggtcgcccgcctcgagcagtgatctcggtgagctgcctgtggacgcaagatttcctcctagagtgccaaaatcttttccattcaacacctcagtcgtgtacaaaaagactctgtttgtagaattcacggatcaccttttcaacatcgctaagccaaggccaccctggatgggtctgctaggtcctaccatccaggctgaggtttatgatacagtggtcattacacttaagaacatggcttcccatcctgtcagtcttcatgctgttggtgtatcctactggaaagcttctgagggagctgaatatgatgatcagaccagtcaaagggagaaagaagatgataaagtcttccctggtggaagccatacatatgtctggcaggtcctgaaagagaatggtccaatggcctctgacccactgtgccttacctactcatatctttctcatgtggacctggtaaaagacttgaattcaggcctcattggagccctactagtatgtagagaagggagtctggccaaggaaaagacacagaccttgcacaaatttatactactttttgctgtatttgatgaagggaaaagttggcactcagaaacaaagaactccttgatgcaggatagggatgctgcatctgctcgggcctggcctaaaatgcacacagtcaatggttatgtaaacaggtctctgccaggtctgattggatgccacaggaaatcagtctattggcatgtgattggaatgggcaccactcctgaagtgcactcaatattcctcgaaggtcacacatttcttgtgaggaaccatcgccaggctagcttggaaatctcgccaataactttccttactgctcaaacactcttgatggaccttggacagtttctactgttttgtcatatctcttcccaccaacatgatggcatggaagcttatgtcaaagtagacagctgtccagaggaaccccaactacgaatgaaaaataatgaagaagcggaagactatgatgatgatcttactgattctgaaatggatgtggtcaggtttgatgatgacaactctccttcctttatccaaattcgctcagttgccaagaagcatcctaaaacttgggtacattacattgctgctgaagaggaggactgggactatgctcccttagtcctcgcccccgatgacagaagttataaaagtggcgcgccaggtgcctcgccgggaacatcatcaactggttcacccgggtcatccccctcggcctcaaccgggacgggtcccggctcatcccccagcgccagcactggaacaggtcctggcactcctggttccggtacggcatcgtcatccccgggaagctcaacaccgtccggagcgacaggatcacctggctcgtcaccttcggcgtcaactggaacggggccaggggcctcacccggaacgtcctcgactgggtcgcctggtacgccgggatcaggaacggcctcatcctcgcctgggtcctcaacgccctcgggtgcgactggttcgccgggaactcctggctcggggacggcctcgtcgtcgcctggggcatcaccggggacgagctccacggggtcccctggagcgtcaccggggacctcctcgacaggtagcccggcctcgagccaatatttgaacaatggccctcagcggattggtaggaagtacaaaaaagtccgatttatggcatacacagatgaaacctttaagactcgtgaagctattcagcatgaatcaggaatcttgggacctttactttatggggaagttggagacacactgttgattatatttaagaatcaagcaagcagaccatataacatctaccctcacggaatcactgatgtccgtcctttgtattcaaggagattaccaaaaggtgtaaaacatttgaaggattttccaattctgccaggagaaatattcaaatataaatggacagtgactgtagaagatgggccaactaaatcagatcctcggtgcctgacccgctattactctagtttcgttaatatggagagagatctagcttcaggactcattggccctctcctcatctgctacaaagaatctgtagatcaaagaggaaaccagataatgtcagacaagaggaatgtcatcctgttttctgtatttgatgagaaccgaagctggtacctcacagagaatatacaacgctttctccccaatccagctggagtgcagcttgaggatccagagttccaagcctccaacatcatgcacagcatcaatggctatgtttttgatagtttgcagttgtcagtttgtttgcatgaggtggcatactggtacattctaagcattggagcacagactgacttcctttctgtcttcttctctggatataccttcaaacacaaaatggtctatgaagacacactcaccctattcccattctcaggagaaactgtcttcatgtcgatggaaaacccaggtctatggattctggggtgccacaactcagactttcggaacagaggcatgaccgccttactgaaggtttctagttgtgacaagaacactggtgattattacgaggacagttatgaagatatttcagcatacttgctgagtaaaaacaatgccattgaaccaagaagcttctctcaaaacggcgcgccaagtcccgctggaagcccaactagcaccgaagaggggacctcagagtccgccacccccgagtccggccctggctctgagcctgccactagcggctccgagactcctggcacatccgaaagcgctacacccgagagtggacccggcacctctaccgagcccagtgagggctccgcccctggaacaagcaccgagcccagcgaaggcagcgccccagggacctccacagagcccagtgaaggcagtgctcctggcaccagcaccgaaccaagcgagggctctgcacccgggacctccaccgagccaagcgaaggctctgcccctggcacttccaccgagcccagcgaaggcagcgcccctgggagccccgctggctctcccaccagcactgaggagggcacatctaccgaaccaagtgaaggctctgcaccaggtgcctcgagcccaccagtcttgaaacgccatcaagctgaaataactcgtactactcttcagtcagatcaagaggaaatcgattatgatgataccatatcagttgaaatgaagaaggaagattttgacatttatgatgaggatgaaaatcagagcccccgcagctttcaaaagaaaacacgacactattttattgctgcagtggagaggctctgggattatgggatgagtagctccccacatgttctaagaaacagggctcagagtggcagtgtccctcagttcaagaaagttgttttccaggaatttactgatggctcctttactcagcccttataccgtggagaactaaatgaacatttgggactcctggggccatatataagagcagaagttgaagataatatcatggtaactttcagaaatcaggcctctcgtccctattccttctattctagccttatttcttatgaggaagatcagaggcaaggagcagaacctagaaaaaactttgtcaagcctaatgaaaccaaaacttacttttggaaagtgcaacatcatatggcacccactaaagatgagtttgactgcaaagcctgggcttatttctctgatgttgacctggaaaaagatgtgcactcaggcctgattggaccccttctggtctgccacactaacacactgaaccctgctcatgggagacaagtgacagtacaggaatttgctctgtttttcaccatctttgatgagaccaaaagctggtacttcactgaaaatatggaaagaaactgcagggctccctgcaatatccagatggaagatcccacttttaaagagaattatcgcttccatgcaatcaatggctacataatggatacactacctggcttagtaatggctcaggatcaaaggattcgatggtatctgctcagcatgggcagcaatgaaaacatccattctattcatttcagtggacatgtgttcactgtacgaaaaaaagaggagtataaaatggcactgtacaatctctatccaggtgtttttgagacagtggaaatgttaccatccaaagctggaatttggcgggtggaatgccttattggcgagcatctacatgctgggatgagcacactttttctggtgtacagcaataagtgtcagactcccctgggaatggcttctggacacattagagattttcagattacagcttcaggacaatatggacagtgggccccaaagctggccagacttcattattccggatcaatcaatgcctggagcaccaaggagcccttttcttggatcaaggtggatctgttggcaccaatgattattcacggcatcaagacccagggtgcccgtcagaagttctccagcctctacatctctcagtttatcatcatgtatagtcttgatgggaagaagtggcagacttatcgaggaaattccactggaaccttaatggtcttctttggcaatgtggattcatctgggataaaacacaatatttttaaccctccaattattgctcgatacatccgtttgcacccaactcattatagcattcgcagcactcttcgcatggagttgatgggctgtgatttaaatagttgcagcatgccattgggaatggagagtaaagcaatatcagatgcacagattactgcttcatcctactttaccaatatgtttgccacctggtctccttcaaaagctcgacttcacctccaagggaggagtaatgcctggagacctcaggtgaataatccaaaagagtggctgcaagtggacttccagaagacaatgaaagtcacaggagtaactactcagggagtaaaatctctgcttaccagcatgtatgtgaaggagttcctcatctccagcagtcaagatggccatcagtggactctcttttttcagaatggcaaagtaaaggtttttcagggaaatcaagactccttcacacctgtggtgaactctctagacccaccgttactgactcgctaccttcgaattcacccccagagttgggtgcaccagattgccctgaggatggaggttctgggctgcgaggcacaggacctctacggcgcgccaggtacctcagagtctgctacccccgagtcagggccaggatcagagccagccacctccgggtctgagacacccgggacttccgagagtgccacccctgagtccggacccgggtccgagcccgccacttccggctccgaaactcccggcacaagcgagagcgctaccccagagtcaggaccaggaacatctacagagccctctgaaggctccgctccagggtccccagccggcagtcccactagcaccgaggagggaacctctgaaagcgccacacccgaatcagggccagggtctgagcctgctaccagcggcagcgagacaccaggcacctctgagtccgccacaccagagtccggacccggatctcccgctgggagccccacctccactgaggagggatctcctgctggctctccaacatctactgaggaaggtacctcaaccgagccatccgagggatcagctcccggcacctcagagtcggcaaccccggagtctggacccggaacttccgaaagtgccacaccagagtccggtcccgggacttcagaatcagcaacacccgagtccggccctgggtctgaacccgccacaagtggtagtgagacaccaggatcagaacctgctacctcagggtcagagacacccggatctccggcaggctcaccaacctccactgaggagggcaccagcacagaaccaagcgagggctccgcacccggaacaagcactgaacccagtgagggttcagcacccggctctgagccggccacaagtggcagtgagacacccggcacttcagagagtgccacccccgagagtggcccaggcactagtaccgagccctctgaaggcagtgcgccagcctcgagcgaacaaaaactcatctcagaagaggatctgtcacctgcaaccggtcatcatcaccatcaccattga

SEQ ID NO: 1351 - protein, 2203 aa, synthetic construct
  REGION 1..2203: note = Description of Artificial Sequence: Synthetic polypeptide
ATRRYYLGAVELSWDYMQGAPGSSPSASTGTGPGSSPSASTGTGPGASPGTSSTGSPGASPGTSSTGSPGSSTPSGATGSPGSSPSASTGTGPGASPGTSSTGSPGSSPSASTGTGPGTPGSGTASSSPGSSTPSGATGSPGSSTPSGATGSPGASPGTSSTGSPASSSDLGELPVDARFPPRVPKSFPFNTSVVYKKTLFVEFTDHLFNIAKPRPPWMGLLGPTIQAEVYDTVVITLKNMASHPVSLHAVGVSYWKASEGAEYDDQTSQREKEDDKVFPGGSHTYVWQVLKENGPMASDPLCLTYSYLSHVDLVKDLNSGLIGALLVCREGSLAKEKTQTLHKFILLFAVFDEGKSWHSETKNSLMQDRDAASARAWPKMHTVNGYVNRSLPGLIGCHRKSVYWHVIGMGTTPEVHSIFLEGHTFLVRNHRQASLEISPITFLTAQTLLMDLGQFLLFCHISSHQHDGMEAYVKVDSCPEEPQLRMKNNEEAEDYDDDLTDSEMDVVRFDDDNSPSFIQIRSVAKKHPKTWVHYIAAEEEDWDYAPLVLAPDDRSYKSQYLNNGPQRIGRKYKKVRFMAYTDETFKTREAIQHESGILGPLLYGEVGDTLLIIFKNQASRPYNIYPHGITDVRPLYSRRLPKGVKHLKDFPILPGEIFKYKWTVTVEDGPTKSDPRCLTRYYSSFVNMERDLASGLIGPLLICYKESVDQRGNQIMSDKRNVILFSVFDENRSWYLTENIQRFLPNPAGVQLEDPEFQASNIMHSINGYVFDSLQLSVCLHEVAYWYILSIGAQTDFLSVFFSGYTFKHKMVYEDTLTLFPFSGETVFMSMENPGLWILGCHNSDFRNRGMTALLKVSSCDKNTGDYYEDSYEDISAYLLSKNNAIEPRSFSQNGAPSPAGSPTSTEEGTSESATPESGPGSEPATSGSETPGTSESATPESGPGTSTEPSEGSAPGTSTEPSEGSAPGTSTEPSEGSAPGTSTEPSEGSAPGTSTEPSEGSAPGTSTEPSEGSAPGSPAGSPTSTEEGTSTEPSEGSAPGASSPPVLKRHQAEITRTTLQSDQEEIDYDDTISVEMKKEDFDIYDEDENQSPRSFQKKTRHYFIAAVERLWDYGMSSSPHVLRNRAQSGSVPQFKKVVFQEFTDGSFTQPLYRGELNEHLGLLGPYIRAEVEDNIMVTFRNQASRPYSFYSSLISYEEDQRQGAEPRKNFVKPNETKTYFWKVQHHMAPTKDEFDCKAWAYFSDVDLEKDVHSGLIGPLLVCHTNTLNPAHGRQVTVQEFALFFTIFDETKSWYFTENMERNCRGAPSPAGSPTSTEEGTSESATPESGPGTSTEPSEGSAPGSPAGSPTSTEEGTSTEPSEGSAPGTSTEPSEGSAPGTSESATPESGPGSEPATSGSETPGSEPATSGSETPGSPAGSPTSTEEGTSESATPESGPGTSTEPSEGSAPGASSAPCNIQMEDPTFKENYRFHAINGYIMDTLPGLVMAQDQRIRWYLLSMGSNENIHSIHFSGHVFTVRKKEEYKMALYNLYPGVFETVEMLPSKAGIWRVECLIGEHLHAGMSTLFLVYSNKCQTPLGMASGHIRDFQITASGQYGQWAPKLARLHYSGSINAWSTKEPFSWIKVDLLAPMIIHGIKTQGARQKFSSLYISQFIIMYSLDGKKWQTYRGNSTGTLMVFFGNVDSSGIKHNIFNPPIIARYIRLHPTHYSIRSTLRMELMGCDLNSCSMPLGMESKAISDAQITASSYFTNMFATWSPSKARLHLQGRSNAWRPQVNNPKEWLQVDFQKTMKVTGVTTQGVKSLLTSMYVKEFLISSSQDGHQWTLFFQNGKVKVFQGNQDSFTPVVNSLDPPLLTRYLRIHPQSWVHQIALRMEVLGCEAQDLYGAPGTSESATPESGPGSEPATSGSETPGTSESATPESGPGSEPATSGSETPGTSESATPESGPGTSTEPSEGSAPGSPAGSPTSTEEGTSESATPESGPGSEPATSGSETPGTSESATPESGPGSPAGSPTSTEEGSPAGSPTSTEEGTSTEPSEGSAPGTSESATPESGPGTSESATPESGPGTSESATPESGPGSEPATSGSETPGSEPATSGSETPGSPAGSPTSTEEGTSTEPSEGSAPGTSTEPSEGSAPGSEPATSGSETPGTSESATPESGPGTSTEPSEGSAPASSEQKLISEEDLSPATGHHHHHH

SEQ ID NO: 1352 - DNA, 6612 bp, synthetic construct
  misc_feature 1..6612: note = Description of Artificial Sequence: Synthetic polynucleotide
  source 1..6612: mol_type = other DNA
gccaccagaagatactacctgggtgcagtggaactgtcatgggactatatgcaaggcgcgccaggctccagcccctccgcgagcacgggaaccggaccaggttcgtcaccctcagcatcaacggggacgggaccgggggcgtcaccaggaacgtcctccaccggctcgccgggtgcatcacccggaacgtcatcgaccggatcgccagggagctcgacgccatcaggcgcaacaggatcacctggctcaagccctagcgcgtcaaccggcacgggtccgggtgcctcccctggcacgtccagcaccggatcacccggatcgagcccatccgcctcaaccggaaccggacccggtacaccagggtcgggaacagcctcctcgtcaccaggctcctcaaccccctcgggagccacgggttcgcccggttcgtcaacgccttccggagcaactggtagccccggagcatcgccaggaacttcgagcacggggtcgcccgcctcgagcagtgatctcggtgagctgcctgtggacgcaagatttcctcctagagtgccaaaatcttttccattcaacacctcagtcgtgtacaaaaagactctgtttgtagaattcacggatcaccttttcaacatcgctaagccaaggccaccctggatgggtctgctaggtcctaccatccaggctgaggtttatgatacagtggtcattacacttaagaacatggcttcccatcctgtcagtcttcatgctgttggtgtatcctactggaaagcttctgagggagctgaatatgatgatcagaccagtcaaagggagaaagaagatgataaagtcttccctggtggaagccatacatatgtctggcaggtcctgaaagagaatggtccaatggcctctgacccactgtgccttacctactcatatctttctcatgtggacctggtaaaagacttgaattcaggcctcattggagccctactagtatgtagagaagggagtctggccaaggaaaagacacagaccttgcacaaatttatactactttttgctgtatttgatgaagggaaaagttggcactcagaaacaaagaactccttgatgcaggatagggatgctgcatctgctcgggcctggcctaaaatgcacacagtcaatggttatgtaaacaggtctctgccaggtctgattggatgccacaggaaatcagtctattggcatgtgattggaatgggcaccactcctgaagtgcactcaatattcctcgaaggtcacacatttcttgtgaggaaccatcgccaggctagcttggaaatctcgccaataactttccttactgctcaaacactcttgatggaccttggacagtttctactgttttgtcatatctcttcccaccaacatgatggcatggaagcttatgtcaaagtagacagctgtccagaggaaccccaactacgaatgaaaaataatgaagaagcggaagactatgatgatgatcttactgattctgaaatggatgtggtcaggtttgatgatgacaactctccttcctttatccaaattcgctcagttgccaagaagcatcctaaaacttgggtacattacattgctgctgaagaggaggactgggactatgctcccttagtcctcgcccccgatgacagaagttataaaagtcaatatttgaacaatggccctcagcggattggtaggaagtacaaaaaagtccgatttatggcatacacagatgaaacctttaagactcgtgaagctattcagcatgaatcaggaatcttgggacctttactttatggggaagttggagacacactgttgattatatttaagaatcaagcaagcagaccatataacatctaccctcacggaatcactgatgtccgtcctttgtattcaaggagattaccaaaaggtgtaaaacatttgaaggattttccaattctgccaggagaaatattcaaatataaatggacagtgactgtagaagatgggccaactaaatcagatcctcggtgcctgacccgctattactctagtttcgttaatatggagagagatctagcttcaggactcattggccctctcctcatctgctacaaagaatctgtagatcaaagaggaaaccagataatgtcagacaagaggaatgtcatcctgttttctgtatttgatgagaaccgaagctggtacctcacagagaatatacaacgctttctccccaatccagctggagtgcagcttgaggatccagagttccaagcctccaacatcatgcacagcatcaatggctatgtttttgatagtttgcagttgtcagtttgtttgcatgaggtggcatactggtacattctaagcattggagcacagactgacttcctttctgtcttcttctctggatataccttcaaacacaaaatggtctatgaagacacactcaccctattcccattctcaggagaaactgtcttcatgtcgatggaaaacccaggtctatggattctggggtgccacaactcagactttcggaacagaggcatgaccgccttactgaaggtttctagttgtgacaagaacactggtgattattacgaggacagttatgaagatatttcagcatacttgctgagtaaaaacaatgccattgaaccaagaagcttctctcaaaacggcgcgccaagtcccgctggaagcccaactagcaccgaagaggggacctcagagtccgccacccccgagtccggccctggctctgagcctgccactagcggctccgagactcctggcacatccgaaagcgctacacccgagagtggacccggcacctctaccgagcccagtgagggctccgcccctggaacaagcaccgagcccagcgaaggcagcgccccagggacctccacagagcccagtgaaggcagtgctcctggcaccagcaccgaaccaagcgagggctctgcacccgggacctccaccgagccaagcgaaggctctgcccctggcacttccaccgagcccagcgaaggcagcgcccctgggagccccgctggctctcccaccagcactgaggagggcacatctaccgaaccaagtgaaggctctgcaccaggtgcctcgagcccaccagtcttgaaacgccatcaagctgaaataactcgtactactcttcagtcagatcaagaggaaatcgattatgatgataccatatcagttgaaatgaagaaggaagattttgacatttatgatgaggatgaaaatcagagcccccgcagctttcaaaagaaaacacgacactattttattgctgcagtggagaggctctgggattatgggatgagtagctccccacatgttctaagaaacagggctcagagtggcagtgtccctcagttcaagaaagttgttttccaggaatttactgatggctcctttactcagcccttataccgtggagaactaaatgaacatttgggactcctggggccatatataagagcagaagttgaagataatatcatggtaactttcagaaatcaggcctctcgtccctattccttctattctagccttatttcttatgaggaagatcagaggcaaggagcagaacctagaaaaaactttgtcaagcctaatgaaaccaaaacttacttttggaaagtgcaacatcatatggcacccactaaagatgagtttgactgcaaagcctgggcttatttctctgatgttgacctggaaaaagatgtgcactcaggcctgattggaccccttctggtctgccacactaacacactgaaccctgctcatgggagacaagtgacagtacaggaatttgctctgtttttcaccatctttgatgagaccaaaagctggtacttcactgaaaatatggaaagaaactgcaggggcgcgccatctccagccgggtccccaacttcgaccgaggaagggacctccgagtcagctaccccggagtccggtcctggcacctccaccgaaccatcggagggcagcgcccctgggagccctgccgggagccctacaagcaccgaagagggcaccagtacagagccaagtgaggggagcgcccctggtactagtactgaaccatccgaggggtcagctccaggcacgagtgagtccgctacccccgagagcggaccgggctcagagcccgccacgagtggcagtgaaactccaggctcagaacccgccactagtgggtcagagactccaggcagccctgccggatcccctacgtccaccgaggagggaacatctgagtccgcaacacccgaatccggtccaggcacctccacggaacctagtgaaggctcggcaccaggtgcctcgagcgctccctgcaatatccagatggaagatcccacttttaaagagaattatcgcttccatgcaatcaatggctacataatggatacactacctggcttagtaatggctcaggatcaaaggattcgatggtatctgctcagcatgggcagcaatgaaaacatccattctattcatttcagtggacatgtgttcactgtacgaaaaaaagaggagtataaaatggcactgtacaatctctatccaggtgtttttgagacagtggaaatgttaccatccaaagctggaatttggcgggtggaatgccttattggcgagcatctacatgctgggatgagcacactttttctggtgtacagcaataagtgtcagactcccctgggaatggcttctggacacattagagattttcagattacagcttcaggacaatatggacagtgggccccaaagctggccagacttcattattccggatcaatcaatgcctggagcaccaaggagcccttttcttggatcaaggtggatctgttggcaccaatgattattcacggcatcaagacccagggtgcccgtcagaagttctccagcctctacatctctcagtttatcatcatgtatagtcttgatgggaagaagtggcagacttatcgaggaaattccactggaaccttaatggtcttctttggcaatgtggattcatctgggataaaacacaatatttttaaccctccaattattgctcgatacatccgtttgcacccaactcattatagcattcgcagcactcttcgcatggagttgatgggctgtgatttaaatagttgcagcatgccattgggaatggagagtaaagcaatatcagatgcacagattactgcttcatcctactttaccaatatgtttgccacctggtctccttcaaaagctcgacttcacctccaagggaggagtaatgcctggagacctcaggtgaataatccaaaagagtggctgcaagtggacttccagaagacaatgaaagtcacaggagtaactactcagggagtaaaatctctgcttaccagcatgtatgtgaaggagttcctcatctccagcagtcaagatggccatcagtggactctcttttttcagaatggcaaagtaaaggtttttcagggaaatcaagactccttcacacctgtggtgaactctctagacccaccgttactgactcgctaccttcgaattcacccccagagttgggtgcaccagattgccctgaggatggaggttctgggctgcgaggcacaggacctctacggcgcgccaggtacctcagagtctgctacccccgagtcagggccaggatcagagccagccacctccgggtctgagacacccgggacttccgagagtgccacccctgagtccggacccgggtccgagcccgccacttccggctccgaaactcccggcacaagcgagagcgctaccccagagtcaggaccaggaacatctacagagccctctgaaggctccgctccagggtccccagccggcagtcccactagcaccgaggagggaacctctgaaagcgccacacccgaatcagggccagggtctgagcctgctaccagcggcagcgagacaccaggcacctctgagtccgccacaccagagtccggacccggatctcccgctgggagccccacctccactgaggagggatctcctgctggctctccaacatctactgaggaaggtacctcaaccgagccatccgagggatcagctcccggcacctcagagtcggcaaccccggagtctggacccggaacttccgaaagtgccacaccagagtccggtcccgggacttcagaatcagcaacacccgagtccggccctgggtctgaacccgccacaagtggtagtgagacaccaggatcagaacctgctacctcagggtcagagacacccggatctccggcaggctcaccaacctccactgaggagggcaccagcacagaaccaagcgagggctccgcacccggaacaagcactgaacccagtgagggttcagcacccggctctgagccggccacaagtggcagtgagacacccggcacttcagagagtgccacccccgagagtggcccaggcactagtaccgagccctctgaaggcagtgcgccagcctcgagcgaacaaaaactcatctcagaagaggatctgtcacctgcaaccggtcatcatcaccatcaccattga

SEQ ID NO: 1353 - protein, 2203 aa, synthetic construct
  REGION 1..2203: note = Description of Artificial Sequence: Synthetic polypeptide
ATRRYYLGAVELSWDYMQGAPGSSPSASTGTGPGSSPSASTGTGPGASPGTSSTGSPGASPGTSSTGSPGSSTPSGATGSPGSSPSASTGTGPGASPGTSSTGSPGSSPSASTGTGPGTPGSGTASSSPGSSTPSGATGSPGSSTPSGATGSPGASPGTSSTGSPASSSDLGELPVDARFPPRVPKSFPFNTSVVYKKTLFVEFTDHLFNIAKPRPPWMGLLGPTIQAEVYDTVVITLKNMASHPVSLHAVGVSYWKASEGAEYDDQTSQREKEDDKVFPGGSHTYVWQVLKENGPMASDPLCLTYSYLSHVDLVKDLNSGLIGALLVCREGSLAKEKTQTLHKFILLFAVFDEGKSWHSETKNSLMQDRDAASARAWPKMHTVNGYVNRSLPGLIGCHRKSVYWHVIGMGTTPEVHSIFLEGHTFLVRNHRQASLEISPITFLTAQTLLMDLGQFLLFCHISSHQHDGMEAYVKVDSCPEEPQLRMKNNEEAEDYDDDLTDSEMDVVRFDDDNSPSFIQIRSVAKKHPKTWVHYIAAEEEDWDYAPLVLAPDDRSYKSQYLNNGPQRIGRKYKKVRFMAYTDETFKTREAIQHESGILGPLLYGEVGDTLLIIFKNQASRPYNIYPHGITDVRPLYSRRLPKGVKHLKDFPILPGEIFKYKWTVTVEDGPTKSDPRCLTRYYSSFVNMERDLASGLIGPLLICYKESVDQRGNQIMSDKRNVILFSVFDENRSWYLTENIQRFLPNPAGVQLEDPEFQASNIMHSINGYVFDSLQLSVCLHEVAYWYILSIGAQTDFLSVFFSGYTFKHKMVYEDTLTLFPFSGETVFMSMENPGLWILGCHNSDFRNRGMTALLKVSSCDKNTGDYYEDSYEDISAYLLSKNNAIEPRSFSQNGAPSPAGSPTSTEEGTSESATPESGPGSEPATSGSETPGTSESATPESGPGTSTEPSEGSAPGTSTEPSEGSAPGTSTEPSEGSAPGTSTEPSEGSAPGTSTEPSEGSAPGTSTEPSEGSAPGSPAGSPTSTEEGTSTEPSEGSAPGASSPPVLKRHQAEITRTTLQSDQEEIDYDDTISVEMKKEDFDIYDEDENQSPRSFQKKTRHYFIAAVERLWDYGMSSSPHVLRNRAQSGSVPQFKKVVFQEFTDGSFTQPLYRGELNEHLGLLGPYIRAEVEDNIMVTFRNQASRPYSFYSSLISYEEDQRQGAEPRKNFVKPNETKTYFWKVQHHMAPTKDEFDCKAWAYFSDVDLEKDVHSGLIGPLLVCHTNTLNPAHGRQVTVQEFALFFTIFDETKSWYFTENMERNCRAPCNIGAPSPAGSPTSTEEGTSESATPESGPGTSTEPSEGSAPGSPAGSPTSTEEGTSTEPSEGSAPGTSTEPSEGSAPGTSESATPESGPGSEPATSGSETPGSEPATSGSETPGSPAGSPTSTEEGTSESATPESGPGTSTEPSEGSAPGASSQMEDPTFKENYRFHAINGYIMDTLPGLVMAQDQRIRWYLLSMGSNENIHSIHFSGHVFTVRKKEEYKMALYNLYPGVFETVEMLPSKAGIWRVECLIGEHLHAGMSTLFLVYSNKCQTPLGMASGHIRDFQITASGQYGQWAPKLARLHYSGSINAWSTKEPFSWIKVDLLAPMIIHGIKTQGARQKFSSLYISQFIIMYSLDGKKWQTYRGNSTGTLMVFFGNVDSSGIKHNIFNPPIIARYIRLHPTHYSIRSTLRMELMGCDLNSCSMPLGMESKAISDAQITASSYFTNMFATWSPSKARLHLQGRSNAWRPQVNNPKEWLQVDFQKTMKVTGVTTQGVKSLLTSMYVKEFLISSSQDGHQWTLFFQNGKVKVFQGNQDSFTPVVNSLDPPLLTRYLRIHPQSWVHQIALRMEVLGCEAQDLYGAPGTSESATPESGPGSEPATSGSETPGTSESATPESGPGSEPATSGSETPGTSESATPESGPGTSTEPSEGSAPGSPAGSPTSTEEGTSESATPESGPGSEPATSGSETPGTSESATPESGPGSPAGSPTSTEEGSPAGSPTSTEEGTSTEPSEGSAPGTSESATPESGPGTSESATPESGPGTSESATPESGPGSEPATSGSETPGSEPATSGSETPGSPAGSPTSTEEGTSTEPSEGSAPGTSTEPSEGSAPGSEPATSGSETPGTSESATPESGPGTSTEPSEGSAPASSEQKLISEEDLSPATGHHHHHH

SEQ ID NO: 1354 - DNA, 6612 bp, synthetic construct
  misc_feature 1..6612: note = Description of Artificial Sequence: Synthetic polynucleotide
  source 1..6612: mol_type = other DNA
gccaccagaagatactacctgggtgcagtggaactgtcatgggactatatgcaaggcgcgccaggctccagcccctccgcgagcacgggaaccggaccaggttcgtcaccctcagcatcaacggggacgggaccgggggcgtcaccaggaacgtcctccaccggctcgccgggtgcatcacccggaacgtcatcgaccggatcgccagggagctcgacgccatcaggcgcaacaggatcacctggctcaagccctagcgcgtcaaccggcacgggtccgggtgcctcccctggcacgtccagcaccggatcacccggatcgagcccatccgcctcaaccggaaccggacccggtacaccagggtcgggaacagcctcctcgtcaccaggctcctcaaccccctcgggagccacgggttcgcccggttcgtcaacgccttccggagcaactggtagccccggagcatcgccaggaacttcgagcacggggtcgcccgcctcgagcagtgatctcggtgagctgcctgtggacgcaagatttcctcctagagtgccaaaatcttttccattcaacacctcagtcgtgtacaaaaagactctgtttgtagaattcacggatcaccttttcaacatcgctaagccaaggccaccctggatgggtctgctaggtcctaccatccaggctgaggtttatgatacagtggtcattacacttaagaacatggcttcccatcctgtcagtcttcatgctgttggtgtatcctactggaaagcttctgagggagctgaatatgatgatcagaccagtcaaagggagaaagaagatgataaagtcttccctggtggaagccatacatatgtctggcaggtcctgaaagagaatggtccaatggcctctgacccactgtgccttacctactcatatctttctcatgtggacctggtaaaagacttgaattcaggcctcattggagccctactagtatgtagagaagggagtctggccaaggaaaagacacagaccttgcacaaatttatactactttttgctgtatttgatgaagggaaaagttggcactcagaaacaaagaactccttgatgcaggatagggatgctgcatctgctcgggcctggcctaaaatgcacacagtcaatggttatgtaaacaggtctctgccaggtctgattggatgccacaggaaatcagtctattggcatgtgattggaatgggcaccactcctgaagtgcactcaatattcctcgaaggtcacacatttcttgtgaggaaccatcgccaggctagcttggaaatctcgccaataactttccttactgctcaaacactcttgatggaccttggacagtttctactgttttgtcatatctcttcccaccaacatgatggcatggaagcttatgtcaaagtagacagctgtccagaggaaccccaactacgaatgaaaaataatgaagaagcggaagactatgatgatgatcttactgattctgaaatggatgtggtcaggtttgatgatgacaactctccttcctttatccaaattcgctcagttgccaagaagcatcctaaaacttgggtacattacattgctgctgaagaggaggactgggactatgctcccttagtcctcgcccccgatgacagaagttataaaagtcaatatttgaacaatggccctcagcggattggtaggaagtacaaaaaagtccgatttatggcatacacagatgaaacctttaagactcgtgaagctattcagcatgaatcaggaatcttgggacctttactttatggggaagttggagacacactgttgattatatttaagaatcaagcaagcagaccatataacatctaccctcacggaatcactgatgtccgtcctttgtattcaaggagattaccaaaaggtgtaaaacatttgaaggattttccaattctgccaggagaaatattcaaatataaatggacagtgactgtagaagatgggccaactaaatcagatcctcggtgcctgacccgctattactctagtttcgttaatatggagagagatctagcttcaggactcattggccctctcctcatctgctacaaagaatctgtagatcaaagaggaaaccagataatgtcagacaagaggaatgtcatcctgttttctgtatttgatgagaaccgaagctggtacctcacagagaatatacaacgctttctccccaatccagctggagtgcagcttgaggatccagagttccaagcctccaacatcatgcacagcatcaatggctatgtttttgatagtttgcagttgtcagtttgtttgcatgaggtggcatactggtacattctaagcattggagcacagactgacttcctttctgtcttcttctctggatataccttcaaacacaaaatggtctatgaagacacactcaccctattcccattctcaggagaaactgtcttcatgtcgatggaaaacccaggtctatggattctggggtgccacaactcagactttcggaacagaggcatgaccgccttactgaaggtttctagttgtgacaagaacactggtgattattacgaggacagttatgaagatatttcagcatacttgctgagtaaaaacaatgccattgaaccaagaagcttctctcaaaacggcgcgccaagtcccgctggaagcccaactagcaccgaagaggggacctcagagtccgccacccccgagtccggccctggctctgagcctgccactagcggctccgagactcctggcacatccgaaagcgctacacccgagagtggacccggcacctctaccgagcccagtgagggctccgcccctggaacaagcaccgagcccagcgaaggcagcgccccagggacctccacagagcccagtgaaggcagtgctcctggcaccagcaccgaaccaagcgagggctctgcacccgggacctccaccgagccaagcgaaggctctgcccctggcacttccaccgagcccagcgaaggcagcgcccctgggagccccgctggctctcccaccagcactgaggagggcacatctaccgaaccaagtgaaggctctgcaccaggtgcctcgagcccaccagtcttgaaacgccatcaagctgaaataactcgtactactcttcagtcagatcaagaggaaatcgattatgatgataccatatcagttgaaatgaagaaggaagattttgacatttatgatgaggatgaaaatcagagcccccgcagctttcaaaagaaaacacgacactattttattgctgcagtggagaggctctgggattatgggatgagtagctccccacatgttctaagaaacagggctcagagtggcagtgtccctcagttcaagaaagttgttttccaggaatttactgatggctcctttactcagcccttataccgtggagaactaaatgaacatttgggactcctggggccatatataagagcagaagttgaagataatatcatggtaactttcagaaatcaggcctctcgtccctattccttctattctagccttatttcttatgaggaagatcagaggcaaggagcagaacctagaaaaaactttgtcaagcctaatgaaaccaaaacttacttttggaaagtgcaacatcatatggcacccactaaagatgagtttgactgcaaagcctgggcttatttctctgatgttgacctggaaaaagatgtgcactcaggcctgattggaccccttctggtctgccacactaacacactgaaccctgctcatgggagacaagtgacagtacaggaatttgctctgtttttcaccatctttgatgagaccaaaagctggtacttcactgaaaatatggaaagaaactgcagggctccctgcaatatcggcgcgccatctccagccgggtccccaacttcgaccgaggaagggacctccgagtcagctaccccggagtccggtcctggcacctccaccgaaccatcggagggcagcgcccctgggagccctgccgggagccctacaagcaccgaagagggcaccagtacagagccaagtgaggggagcgcccctggtactagtactgaaccatccgaggggtcagctccaggcacgagtgagtccgctacccccgagagcggaccgggctcagagcccgccacgagtggcagtgaaactccaggctcagaacccgccactagtgggtcagagactccaggcagccctgccggatcccctacgtccaccgaggagggaacatctgagtccgcaacacccgaatccggtccaggcacctccacggaacctagtgaaggctcggcaccaggtgcctcgagccagatggaagatcccacttttaaagagaattatcgcttccatgcaatcaatggctacataatggatacactacctggcttagtaatggctcaggatcaaaggattcgatggtatctgctcagcatgggcagcaatgaaaacatccattctattcatttcagtggacatgtgttcactgtacgaaaaaaagaggagtataaaatggcactgtacaatctctatccaggtgtttttgagacagtggaaatgttaccatccaaagctggaatttggcgggtggaatgccttattggcgagcatctacatgctgggatgagcacactttttctggtgtacagcaataagtgtcagactcccctgggaatggcttctggacacattagagattttcagattacagcttcaggacaatatggacagtgggccccaaagctggccagacttcattattccggatcaatcaatgcctggagcaccaaggagcccttttcttggatcaaggtggatctgttggcaccaatgattattcacggcatcaagacccagggtgcccgtcagaagttctccagcctctacatctctcagtttatcatcatgtatagtcttgatgggaagaagtggcagacttatcgaggaaattccactggaaccttaatggtcttctttggcaatgtggattcatctgggataaaacacaatatttttaaccctccaattattgctcgatacatccgtttgcacccaactcattatagcattcgcagcactcttcgcatggagttgatgggctgtgatttaaatagttgcagcatgccattgggaatggagagtaaagcaatatcagatgcacagattactgcttcatcctactttaccaatatgtttgccacctggtctccttcaaaagctcgacttcacctccaagggaggagtaatgcctggagacctcaggtgaataatccaaaagagtggctgcaagtggacttccagaagacaatgaaagtcacaggagtaactactcagggagtaaaatctctgcttaccagcatgtatgtgaaggagttcctcatctccagcagtcaagatggccatcagtggactctcttttttcagaatggcaaagtaaaggtttttcagggaaatcaagactccttcacacctgtggtgaactctctagacccaccgttactgactcgctaccttcgaattcacccccagagttgggtgcaccagattgccctgaggatggaggttctgggctgcgaggcacaggacctctacggcgcgccaggtacctcagagtctgctacccccgagtcagggccaggatcagagccagccacctccgggtctgagacacccgggacttccgagagtgccacccctgagtccggacccgggtccgagcccgccacttccggctccgaaactcccggcacaagcgagagcgctaccccagagtcaggaccaggaacatctacagagccctctgaaggctccgctccagggtccccagccggcagtcccactagcaccgaggagggaacctctgaaagcgccacacccgaatcagggccagggtctgagcctgctaccagcggcagcgagacaccaggcacctctgagtccgccacaccagagtccggacccggatctcccgctgggagccccacctccactgaggagggatctcctgctggctctccaacatctactgaggaaggtacctcaaccgagccatccgagggatcagctcccggcacctcagagtcggcaaccccggagtctggacccggaacttccgaaagtgccacaccagagtccggtcccgggacttcagaatcagcaacacccgagtccggccctgggtctgaacccgccacaagtggtagtgagacaccaggatcagaacctgctacctcagggtcagagacacccggatctccggcaggctcaccaacctccactgaggagggcaccagcacagaaccaagcgagggctccgcacccggaacaagcactgaacccagtgagggttcagcacccggctctgagccggccacaagtggcagtgagacacccggcacttcagagagtgccacccccgagagtggcccaggcactagtaccgagccctctgaaggcagtgcgccagcctcgagcgaacaaaaactcatctcagaagaggatctgtcacctgcaaccggtcatcatcaccatcaccattga

SEQ ID NO: 1355 - protein, 2206 aa, synthetic construct
  REGION 1..2206: note = Description of Artificial Sequence: Synthetic polypeptide
ATRRYYLGAVELSWDYMQSDLGELPVDARFPPRVPKSFPFNTSVVYKKTLFVEFTDHLFNIAKPRPPWMGLLGPTIQAEVYDTVVITLKNMASHPVSLHAVGVSYWKASEGAEYDDQTSQREKEDDKVFPGGSHTYVWQVLKENGPMASDPLCLTYSYLSHVDLVKDLNSGLIGALLVCREGSLAKEKTQTLHKFILLFAVFDEGKSWHSETKNSLMQDRDAASARAWPKMHTVNGYVNRSLPGLIGCHRKSVYWHVIGMGTTPEVHSIFLEGHTFLVRNHRQASLEISPITFLTAQTLLMDLGQFLLFCHISSHQHDGMEAYVKVDSCPEEPQLRMKNNEEAEDYDDDLTDSEMDVVRFDDDNSPSFIQIRSVAKKHPKTWVHYIAAEEEDWDYAPLVLAPDGAPTSTEPSEGSAPGSPAGSPTSTEEGTSTEPSEGSAPGTSTEPSEGSAPGTSESATPESGPGTSTEPSEGSAPGTSESATPESGPGSEPATSGSETPGTSTEPSEGSAPGTSTEPSEGSAPGTSESATPESGPGTSESATPESGPGASSDRSYKSQYLNNGPQRIGRKYKKVRFMAYTDETFKTREAIQHESGILGPLLYGEVGDTLLIIFKNQASRPYNIYPHGITDVRPLYSRRLPKGVKHLKDFPILPGEIFKYKWTVTVEDGPTKSDPRCLTRYYSSFVNMERDLASGLIGPLLICYKESVDQRGNQIMSDKRNVILFSVFDENRSWYLTENIQRFLPNPAGVQLEDPEFQASNIMHSINGYVFDSLQLSVCLHEVAYWYILSIGAQTDFLSVFFSGYTFKHKMVYEDTLTLFPFSGETVFMSMENPGLWILGCHNSDFRNRGMTALLKVSSCDKNTGDYYEDSYEDISAYLLSKNNAIEPRSFSQNGAPSPAGSPTSTEEGTSESATPESGPGSEPATSGSETPGTSESATPESGPGTSTEPSEGSAPGTSTEPSEGSAPGTSTEPSEGSAPGTSTEPSEGSAPGTSTEPSEGSAPGTSTEPSEGSAPGSPAGSPTSTEEGTSTEPSEGSAPGASSPPVLKRHQAEITRTTLQSDQEEIDYDDTISVEMKKEDFDIYDEDENQSPRSFQKKTRHYFIAAVERLWDYGMSSSPHVLRNRAQGAPTSESATPESGPGSEPATSGSETPGTSESATPESGPGSEPATSGSETPGTSESATPESGPGTSTEPSEGSAPGTSESATPESGPGSPAGSPTSTEEGSPAGSPTSTEEGSPAGSPTSTEEGTSESATPESGPGTSTEPSEGSAPGASSRAQSGSVPQFKKVVFQEFTDGSFTQPLYRGELNEHLGLLGPYIRAEVEDNIMVTFRNQASRPYSFYSSLISYEEDQRQGAEPRKNFVKPNETKTYFWKVQHHMAPTKDEFDCKAWAYFSDVDLEKDVHSGLIGPLLVCHTNTLNPAHGRQVTVQEFALFFTIFDETKSWYFTENMERNCRAPCNIQMEDPTFKENYRFHAINGYIMDTLPGLVMAQDQRIRWYLLSMGSNENIHSIHFSGHVFTVRKKEEYKMALYNLYPGVFETVEMLPSKAGIWRVECLIGEHLHAGMSTLFLVYSNKCQTPLGMASGHIRDFQITASGQYGQWAPKLARLHYSGSINAWSTKEPFSWIKVDLLAPMIIHGIKTQGARQKFSSLYISQFIIMYSLDGKKWQTYRGNSTGTLMVFFGNVDSSGIKHNIFNPPIIARYIRLHPTHYSIRSTLRMELMGCDLNSCSMPLGMESKAISDAQITASSYFTNMFATWSPSKARLHLQGRSNAWRPQVNNPKEWLQVDFQKTMKVTGVTTQGVKSLLTSMYVKEFLISSSQDGHQWTLFFQNGKVKVFQGNQDSFTPVVNSLDPPLLTRYLRIHPQSWVHQIALRMEVLGCEAQDLYGAPGTSESATPESGPGSEPATSGSETPGTSESATPESGPGSEPATSGSETPGTSESATPESGPGTSTEPSEGSAPGSPAGSPTSTEEGTSESATPESGPGSEPATSGSETPGTSESATPESGPGSPAGSPTSTEEGSPAGSPTSTEEGTSTEPSEGSAPGTSESATPESGPGTSESATPESGPGTSESATPESGPGSEPATSGSETPGSEPATSGSETPGSPAGSPTSTEEGTSTEPSEGSAPGTSTEPSEGSAPGSEPATSGSETPGTSESATPESGPGTSTEPSEGSAPASSEQKLISEEDLSPATGHHHHHH

SEQ ID NO: 1356 - DNA, 6621 bp, synthetic construct
  misc_feature 1..6621: note = Description of Artificial Sequence: Synthetic polynucleotide
  source 1..6621: mol_type = other DNA
gccaccagaagatactacctgggtgcagtggaactgtcatgggactatatgcaaagtgatctcggtgagctgcctgtggacgcaagatttcctcctagagtgccaaaatcttttccattcaacacctcagtcgtgtacaaaaagactctgtttgtagaattcacggatcaccttttcaacatcgctaagccaaggccaccctggatgggtctgctaggtcctaccatccaggctgaggtttatgatacagtggtcattacacttaagaacatggcttcccatcctgtcagtcttcatgctgttggtgtatcctactggaaagcttctgagggagctgaatatgatgatcagaccagtcaaagggagaaagaagatgataaagtcttccctggtggaagccatacatatgtctggcaggtcctgaaagagaatggtccaatggcctctgacccactgtgccttacctactcatatctttctcatgtggacctggtaaaagacttgaattcaggcctcattggagccctactagtatgtagagaagggagtctggccaaggaaaagacacagaccttgcacaaatttatactactttttgctgtatttgatgaagggaaaagttggcactcagaaacaaagaactccttgatgcaggatagggatgctgcatctgctcgggcctggcctaaaatgcacacagtcaatggttatgtaaacaggtctctgccaggtctgattggatgccacaggaaatcagtctattggcatgtgattggaatgggcaccactcctgaagtgcactcaatattcctcgaaggtcacacatttcttgtgaggaaccatcgccaggctagcttggaaatctcgccaataactttccttactgctcaaacactcttgatggaccttggacagtttctactgttttgtcatatctcttcccaccaacatgatggcatggaagcttatgtcaaagtagacagctgtccagaggaaccccaactacgaatgaaaaataatgaagaagcggaagactatgatgatgatcttactgattctgaaatggatgtggtcaggtttgatgatgacaactctccttcctttatccaaattcgctcagttgccaagaagcatcctaaaacttgggtacattacattgctgctgaagaggaggactgggactatgctcccttagtcctcgcccccgatggcgcgccaaccagtacggagccgtccgaggggagcgcaccaggaagcccggctgggagcccgacttctaccgaagagggtacatctaccgaaccaagtgaaggttcagcaccaggcacctcaacagaaccctctgagggctcggcgcctggtacaagtgagtccgccaccccagaatccgggcctgggacaagcacagaaccttcggaagggagtgcccctggaacatccgaatcggcaaccccagaatcagggccaggatctgagcccgcgacttcgggctccgagacgcctgggacatccaccgagccctccgaaggatcagccccaggcaccagcacggagccctctgagggaagcgcacctggtaccagcgaaagcgcaactcccgaatcaggtcccggtacgagcgagtcggcgaccccggagagcgggccaggtgcctcgagcgacagaagttataaaagtcaatatttgaacaatggccctcagcggattggtaggaagtacaaaaaagtccgatttatggcatacacagatgaaacctttaagactcgtgaagctattcagcatgaatcaggaatcttgggacctttactttatggggaagttggagacacactgttgattatatttaagaatcaagcaagcagaccatataacatctaccctcacggaatcactgatgtccgtcctttgtattcaaggagattaccaaaaggtgtaaaacatttgaaggattttccaattctgccaggagaaatattcaaatataaatggacagtgactgtagaagatgggccaactaaatcagatcctcggtgcctgacccgctattactctagtttcgttaatatggagagagatctagcttcaggactcattggccctctcctcatctgctacaaagaatctgtagatcaaagaggaaaccagataatgtcagacaagaggaatgtcatcctgttttctgtatttgatgagaaccgaagctggtacctcacagagaatatacaacgctttctccccaatccagctggagtgcagcttgaggatccagagttccaagcctccaacatcatgcacagcatcaatggctatgtttttgatagtttgcagttgtcagtttgtttgcatgaggtggcatactggtacattctaagcattggagcacagactgacttcctttctgtcttcttctctggatataccttcaaacacaaaatggtctatgaagacacactcaccctattcccattctcaggagaaactgtcttcatgtcgatggaaaacccaggtctatggattctggggtgccacaactcagactttcggaacagaggcatgaccgccttactgaaggtttctagttgtgacaagaacactggtgattattacgaggacagttatgaagatatttcagcatacttgctgagtaaaaacaatgccattgaaccaagaagcttctctcaaaacggcgcgccaagtcccgctggaagcccaactagcaccgaagaggggacctcagagtccgccacccccgagtccggccctggctctgagcctgccactagcggctccgagactcctggcacatccgaaagcgctacacccgagagtggacccggcacctctaccgagcccagtgagggctccgcccctggaacaagcaccgagcccagcgaaggcagcgccccagggacctccacagagcccagtgaaggcagtgctcctggcaccagcaccgaaccaagcgagggctctgcacccgggacctccaccgagccaagcgaaggctctgcccctggcacttccaccgagcccagcgaaggcagcgcccctgggagccccgctggctctcccaccagcactgaggagggcacatctaccgaaccaagtgaaggctctgcaccaggtgcctcgagcccaccagtcttgaaacgccatcaagctgaaataactcgtactactcttcagtcagatcaagaggaaatcgattatgatgataccatatcagttgaaatgaagaaggaagattttgacatttatgatgaggatgaaaatcagagcccccgcagctttcaaaagaaaacacgacactattttattgctgcagtggagaggctctgggattatgggatgagtagctccccacatgttctaagaaacagggctcagggcgcgccaacgtccgaaagtgctacccctgagtcaggccctggtagtgagcctgccacaagcggaagcgaaactccggggacctcagagtctgccactcccgaatcggggccaggctctgaaccggccacttcagggagcgaaacaccaggaacatcggagagcgctaccccggagagcgggccaggaactagtactgagcctagcgagggaagtgcacctggtacaagcgagtccgccacacccgagtctggccctggctctccagcgggctcacccacgagcactgaagagggctctcccgctggcagcccaacgtcgacagaagaaggatcaccagcaggctcccccacatcaacagaggagggtacatcagaatctgctactcccgagagtggacccggtacctccactgagcccagcgaggggagtgcaccaggtgcctcgagcagggctcagagtggcagtgtccctcagttcaagaaagttgttttccaggaatttactgatggctcctttactcagcccttataccgtggagaactaaatgaacatttgggactcctggggccatatataagagcagaagttgaagataatatcatggtaactttcagaaatcaggcctctcgtccctattccttctattctagccttatttcttatgaggaagatcagaggcaaggagcagaacctagaaaaaactttgtcaagcctaatgaaaccaaaacttacttttggaaagtgcaacatcatatggcacccactaaagatgagtttgactgcaaagcctgggcttatttctctgatgttgacctggaaaaagatgtgcactcaggcctgattggaccccttctggtctgccacactaacacactgaaccctgctcatgggagacaagtgacagtacaggaatttgctctgtttttcaccatctttgatgagaccaaaagctggtacttcactgaaaatatggaaagaaactgcagggctccctgcaatatccagatggaagatcccacttttaaagagaattatcgcttccatgcaatcaatggctacataatggatacactacctggcttagtaatggctcaggatcaaaggattcgatggtatctgctcagcatgggcagcaatgaaaacatccattctattcatttcagtggacatgtgttcactgtacgaaaaaaagaggagtataaaatggcactgtacaatctctatccaggtgtttttgagacagtggaaatgttaccatccaaagctggaatttggcgggtggaatgccttattggcgagcatctacatgctgggatgagcacactttttctggtgtacagcaataagtgtcagactcccctgggaatggcttctggacacattagagattttcagattacagcttcaggacaatatggacagtgggccccaaagctggccagacttcattattccggatcaatcaatgcctggagcaccaaggagcccttttcttggatcaaggtggatctgttggcaccaatgattattcacggcatcaagacccagggtgcccgtcagaagttctccagcctctacatctctcagtttatcatcatgtatagtcttgatgggaagaagtggcagacttatcgaggaaattccactggaaccttaatggtcttctttggcaatgtggattcatctgggataaaacacaatatttttaaccctccaattattgctcgatacatccgtttgcacccaactcattatagcattcgcagcactcttcgcatggagttgatgggctgtgatttaaatagttgcagcatgccattgggaatggagagtaaagcaatatcagatgcacagattactgcttcatcctactttaccaatatgtttgccacctggtctccttcaaaagctcgacttcacctccaagggaggagtaatgcctggagacctcaggtgaataatccaaaagagtggctgcaagtggacttccagaagacaatgaaagtcacaggagtaactactcagggagtaaaatctctgcttaccagcatgtatgtgaaggagttcctcatctccagcagtcaagatggccatcagtggactctcttttttcagaatggcaaagtaaaggtttttcagggaaatcaagactccttcacacctgtggtgaactctctagacccaccgttactgactcgctaccttcgaattcacccccagagttgggtgcaccagattgccctgaggatggaggttctgggctgcgaggcacaggacctctacggcgcgccaggtacctcagagtctgctacccccgagtcagggccaggatcagagccagccacctccgggtctgagacacccgggacttccgagagtgccacccctgagtccggacccgggtccgagcccgccacttccggctccgaaactcccggcacaagcgagagcgctaccccagagtcaggaccaggaacatctacagagccctctgaaggctccgctccagggtccccagccggcagtcccactagcaccgaggagggaacctctgaaagcgccacacccgaatcagggccagggtctgagcctgctaccagcggcagcgagacaccaggcacctctgagtccgccacaccagagtccggacccggatctcccgctgggagccccacctccactgaggagggatctcctgctggctctccaacatctactgaggaaggtacctcaaccgagccatccgagggatcagctcccggcacctcagagtcggcaaccccggagtctggacccggaacttccgaaagtgccacaccagagtccggtcccgggacttcagaatcagcaacacccgagtccggccctgggtctgaacccgccacaagtggtagtgagacaccaggatcagaacctgctacctcagggtcagagacacccggatctccggcaggctcaccaacctccactgaggagggcaccagcacagaaccaagcgagggctccgcacccggaacaagcactgaacccagtgagggttcagcacccggctctgagccggccacaagtggcagtgagacacccggcacttcagagagtgccacccccgagagtggcccaggcactagtaccgagccctctgaaggcagtgcgccagcctcgagcgaacaaaaactcatctcagaagaggatctgtcacctgcaaccggtcatcatcaccatcaccattga

SEQ ID NO: 1357 - protein, 2203 aa, synthetic construct
  REGION 1..2203: note = Description of Artificial Sequence: Synthetic polypeptide
ATRRYYLGAVELSWDYMQSDLGELPVDARFPPRVPKSFPFNTSVVYKKTLFVEFTDHLFNIAKPRPPWMGLLGPTIQAEVYDTVVITLKNMASHPVSLHAVGVSYWKASEGAEYDDQTSQREKEDDKVFPGGSHTYVWQVLKENGPMASDPLCLTYSYLSHVDLVKDLNSGLIGALLVCREGSLAKEKTQTLHKFILLFAVFDEGKSWHSETKNSLMQDRDAASARAWPKMHTVNGYVNRSLPGLIGCHRKSVYWHVIGMGTTPEVHSIFLEGHTFLVRNHRQASLEISPITFLTAQTLLMDLGQFLLFCHISSHQHDGMEAYVKVDSCPEEPQLRMKNNEEAEDYDDDLTDSEMDVVRFDDDNSPSFIQIRSVAKKHPKTWVHYIAAEEEDWDYAPLVLAPDDRSYKSGAPTSTEPSEGSAPGSPAGSPTSTEEGTSTEPSEGSAPGTSTEPSEGSAPGTSESATPESGPGTSTEPSEGSAPGTSESATPESGPGSEPATSGSETPGTSTEPSEGSAPGTSTEPSEGSAPGTSESATPESGPGTSESATPESGPGASSQYLNNGPQRIGRKYKKVRFMAYTDETFKTREAIQHESGILGPLLYGEVGDTLLIIFKNQASRPYNIYPHGITDVRPLYSRRLPKGVKHLKDFPILPGEIFKYKWTVTVEDGPTKSDPRCLTRYYSSFVNMERDLASGLIGPLLICYKESVDQRGNQIMSDKRNVILFSVFDENRSWYLTENIQRFLPNPAGVQLEDPEFQASNIMHSINGYVFDSLQLSVCLHEVAYWYILSIGAQTDFLSVFFSGYTFKHKMVYEDTLTLFPFSGETVFMSMENPGLWILGCHNSDFRNRGMTALLKVSSCDKNTGDYYEDSYEDISAYLLSKNNAIEPRSFSQNGAPSPAGSPTSTEEGTSESATPESGPGSEPATSGSETPGTSESATPESGPGTSTEPSEGSAPGTSTEPSEGSAPGTSTEPSEGSAPGTSTEPSEGSAPGTSTEPSEGSAPGTSTEPSEGSAPGSPAGSPTSTEEGTSTEPSEGSAPGASSPPVLKRHQAEITRTTLQSDQEEIDYDDTISVEMKKEDFDIYDEDENQSPRSFQKKTRHYFIAAVERLWDYGMSSSPHVLRNRAQSGSVPQFKKVVFQEFTDGSFTQPLYRGELNEHLGLLGPYIRAEVEDNIMVTFRNQASRPYSFYSSLISYEEDQRQGAEPRKNFVKPNETKTYFWKVQHHMAPTKDEFDCKAWAYFSDVDLEKDVHSGLIGPLLVCHTNTLNPAHGRQVTVQEFALFFTIFDETKSWYFTENMERNCRAPCNIQMEDPGAPGTPGSGTASSSPGASPGTSSTGSPGASPGTSSTGSPGASPGTSSTGSPGSSPSASTGTGPGTPGSGTASSSPGASPGTSSTGSPGASPGTSSTGSPGASPGTSSTGSPGSSTPSGATGSPGSSTPSGATGSPGASPGTSSTGSPASSTFKENYRFHAINGYIMDTLPGLVMAQDQRIRWYLLSMGSNENIHSIHFSGHVFTVRKKEEYKMALYNLYPGVFETVEMLPSKAGIWRVECLIGEHLHAGMSTLFLVYSNKCQTPLGMASGHIRDFQITASGQYGQWAPKLARLHYSGSINAWSTKEPFSWIKVDLLAPMIIHGIKTQGARQKFSSLYISQFIIMYSLDGKKWQTYRGNSTGTLMVFFGNVDSSGIKHNIFNPPIIARYIRLHPTHYSIRSTLRMELMGCDLNSCSMPLGMESKAISDAQITASSYFTNMFATWSPSKARLHLQGRSNAWRPQVNNPKEWLQVDFQKTMKVTGVTTQGVKSLLTSMYVKEFLISSSQDGHQWTLFFQNGKVKVFQGNQDSFTPVVNSLDPPLLTRYLRIHPQSWVHQIALRMEVLGCEAQDLYGAPGTSESATPESGPGSEPATSGSETPGTSESATPESGPGSEPATSGSETPGTSESATPESGPGTSTEPSEGSAPGSPAGSPTSTEEGTSESATPESGPGSEPATSGSETPGTSESATPESGPGSPAGSPTSTEEGSPAGSPTSTEEGTSTEPSEGSAPGTSESATPESGPGTSESATPESGPGTSESATPESGPGSEPATSGSETPGSEPATSGSETPGSPAGSPTSTEEGTSTEPSEGSAPGTSTEPSEGSAPGSEPATSGSETPGTSESATPESGPGTSTEPSEGSAPASSEQKLISEEDLSPATGHHHHHH

SEQ ID NO: 1358 - DNA, 6612 bp, synthetic construct
  misc_feature 1..6612: note = Description of Artificial Sequence: Synthetic polynucleotide
  source 1..6612: mol_type = other DNA
gccaccagaagatactacctgggtgcagtggaactgtcatgggactatatgcaaagtgatctcggtgagctgcctgtggacgcaagatttcctcctagagtgccaaaatcttttccattcaacacctcagtcgtgtacaaaaagactctgtttgtagaattcacggatcaccttttcaacatcgctaagccaaggccaccctggatgggtctgctaggtcctaccatccaggctgaggtttatgatacagtggtcattacacttaagaacatggcttcccatcctgtcagtcttcatgctgttggtgtatcctactggaaagcttctgagggagctgaatatgatgatcagaccagtcaaagggagaaagaagatgataaagtcttccctggtggaagccatacatatgtctggcaggtcctgaaagagaatggtccaatggcctctgacccactgtgccttacctactcatatctttctcatgtggacctggtaaaagacttgaattcaggcctcattggagccctactagtatgtagagaagggagtctggccaaggaaaagacacagaccttgcacaaatttatactactttttgctgtatttgatgaagggaaaagttggcactcagaaacaaagaactccttgatgcaggatagggatgctgcatctgctcgggcctggcctaaaatgcacacagtcaatggttatgtaaacaggtctctgccaggtctgattggatgccacaggaaatcagtctattggcatgtgattggaatgggcaccactcctgaagtgcactcaatattcctcgaaggtcacacatttcttgtgaggaaccatcgccaggctagcttggaaatctcgccaataactttccttactgctcaaacactcttgatggaccttggacagtttctactgttttgtcatatctcttcccaccaacatgatggcatggaagcttatgtcaaagtagacagctgtccagaggaaccccaactacgaatgaaaaataatgaagaagcggaagactatgatgatgatcttactgattctgaaatggatgtggtcaggtttgatgatgacaactctccttcctttatccaaattcgctcagttgccaagaagcatcctaaaacttgggtacattacattgctgctgaagaggaggactgggactatgctcccttagtcctcgcccccgatgacagaagttataaaagtggcgcgccaaccagtacggagccgtccgaggggagcgcaccaggaagcccggctgggagcccgacttctaccgaagagggtacatctaccgaaccaagtgaaggttcagcaccaggcacctcaacagaaccctctgagggctcggcgcctggtacaagtgagtccgccaccccagaatccgggcctgggacaagcacagaaccttcggaagggagtgcccctggaacatccgaatcggcaaccccagaatcagggccaggatctgagcccgcgacttcgggctccgagacgcctgggacatccaccgagccctccgaaggatcagccccaggcaccagcacggagccctctgagggaagcgcacctggtaccagcgaaagcgcaactcccgaatcaggtcccggtacgagcgagtcggcgaccccggagagcgggccaggtgcctcgagccaatatttgaacaatggccctcagcggattggtaggaagtacaaaaaagtccgatttatggcatacacagatgaaacctttaagactcgtgaagctattcagcatgaatcaggaatcttgggacctttactttatggggaagttggagacacactgttgattatatttaagaatcaagcaagcagaccatataacatctaccctcacggaatcactgatgtccgtcctttgtattcaaggagattaccaaaaggtgtaaaacatttgaaggattttccaattctgccaggagaaatattcaaatataaatggacagtgactgtagaagatgggccaactaaatcagatcctcggtgcctgacccgctattactctagtttcgttaatatggagagagatctagcttcaggactcattggccctctcctcatctgctacaaagaatctgtagatcaaagaggaaaccagataatgtcagacaagaggaatgtcatcctgttttctgtatttgatgagaaccgaagctggtacctcacagagaatatacaacgctttctccccaatccagctggagtgcagcttgaggatccagagttccaagcctccaacatcatgcacagcatcaatggctatgtttttgatagtttgcagttgtcagtttgtttgcatgaggtggcatactggtacattctaagcattggagcacagactgacttcctttctgtcttcttctctggatataccttcaaacacaaaatggtctatgaagacacactcaccctattcccattctcaggagaaactgtcttcatgtcgatggaaaacccaggtctatggattctggggtgccacaactcagactttcggaacagaggcatgaccgccttactgaaggtttctagttgtgacaagaacactggtgattattacgaggacagttatgaagatatttcagcatacttgctgagtaaaaacaatgccattgaaccaagaagcttctctcaaaacggcgcgccaagtcccgctggaagcccaactagcaccgaagaggggacctcagagtccgccacccccgagtccggccctggctctgagcctgccactagcggctccgagactcctggcacatccgaaagcgctacacccgagagtggacccggcacctctaccgagcccagtgagggctccgcccctggaacaagcaccgagcccagcgaaggcagcgccccagggacctccacagagcccagtgaaggcagtgctcctggcaccagcaccgaaccaagcgagggctctgcacccgggacctccaccgagccaagcgaaggctctgcccctggcacttccaccgagcccagcgaaggcagcgcccctgggagccccgctggctctcccaccagcactgaggagggcacatctaccgaaccaagtgaaggctctgcaccaggtgcctcgagcccaccagtcttgaaacgccatcaagctgaaataactcgtactactcttcagtcagatcaagaggaaatcgattatgatgataccatatcagttgaaatgaagaaggaagattttgacatttatgatgaggatgaaaatcagagcccccgcagctttcaaaagaaaacacgacactattttattgctgcagtggagaggctctgggattatgggatgagtagctccccacatgttctaagaaacagggctcagagtggcagtgtccctcagttcaagaaagttgttttccaggaatttactgatggctcctttactcagcccttataccgtggagaactaaatgaacatttgggactcctggggccatatataagagcagaagttgaagataatatcatggtaactttcagaaatcaggcctctcgtccctattccttctattctagccttatttcttatgaggaagatcagaggcaaggagcagaacctagaaaaaactttgtcaagcctaatgaaaccaaaacttacttttggaaagtgcaacatcatatggcacccactaaagatgagtttgactgcaaagcctgggcttatttctctgatgttgacctggaaaaagatgtgcactcaggcctgattggaccccttctggtctgccacactaacacactgaaccctgctcatgggagacaagtgacagtacaggaatttgctctgtttttcaccatctttgatgagaccaaaagctggtacttcactgaaaatatggaaagaaactgcagggctccctgcaatatccagatggaagatcccggcgcgccaggtacacccggatcgggtacagcgtcatcgagccccggtgcgtcacctggtacgtcgagcacggggtcgccaggggcgtcccctgggacgtcctcaacaggctcgcccggtgcgtcacccggcacgtcgtccacgggttcacctggtagctccccttccgcgtccactggcaccgggcctggaactccggggagcggcacagcgagctcgtcgccgggagcatcgcctgggacatcgagcaccgggtcgccaggagcatcgcccggaacatccagcacaggaagccccggcgcgtcgcccgggacatcaagcacaggttccccgggatcgagcacgccgtccggagccactggatcaccagggagctcgacaccttccggcgcaacgggatcgcccggagccagcccgggtacgtcaagcactggctcccctgcctcgagcacttttaaagagaattatcgcttccatgcaatcaatggctacataatggatacactacctggcttagtaatggctcaggatcaaaggattcgatggtatctgctcagcatgggcagcaatgaaaacatccattctattcatttcagtggacatgtgttcactgtacgaaaaaaagaggagtataaaatggcactgtacaatctctatccaggtgtttttgagacagtggaaatgttaccatccaaagctggaatttggcgggtggaatgccttattggcgagcatctacatgctgggatgagcacactttttctggtgtacagcaataagtgtcagactcccctgggaatggcttctggacacattagagattttcagattacagcttcaggacaatatggacagtgggccccaaagctggccagacttcattattccggatcaatcaatgcctggagcaccaaggagcccttttcttggatcaaggtggatctgttggcaccaatgattattcacggcatcaagacccagggtgcccgtcagaagttctccagcctctacatctctcagtttatcatcatgtatagtcttgatgggaagaagtggcagacttatcgaggaaattccactggaaccttaatggtcttctttggcaatgtggattcatctgggataaaacacaatatttttaaccctccaattattgctcgatacatccgtttgcacccaactcattatagcattcgcagcactcttcgcatggagttgatgggctgtgatttaaatagttgcagcatgccattgggaatggagagtaaagcaatatcagatgcacagattactgcttcatcctactttaccaatatgtttgccacctggtctccttcaaaagctcgacttcacctccaagggaggagtaatgcctggagacctcaggtgaataatccaaaagagtggctgcaagtggacttccagaagacaatgaaagtcacaggagtaactactcagggagtaaaatctctgcttaccagcatgtatgtgaaggagttcctcatctccagcagtcaagatggccatcagtggactctcttttttcagaatggcaaagtaaaggtttttcagggaaatcaagactccttcacacctgtggtgaactctctagacccaccgttactgactcgctaccttcgaattcacccccagagttgggtgcaccagattgccctgaggatggaggttctgggctgcgaggcacaggacctctacggcgcgccaggtacctcagagtctgctacccccgagtcagggccaggatcagagccagccacctccgggtctgagacacccgggacttccgagagtgccacccctgagtccggacccgggtccgagcccgccacttccggctccgaaactcccggcacaagcgagagcgctaccccagagtcaggaccaggaacatctacagagccctctgaaggctccgctccagggtccccagccggcagtcccactagcaccgaggagggaacctctgaaagcgccacacccgaatcagggccagggtctgagcctgctaccagcggcagcgagacaccaggcacctctgagtccgccacaccagagtccggacccggatctcccgctgggagccccacctccactgaggagggatctcctgctggctctccaacatctactgaggaaggtacctcaaccgagccatccgagggatcagctcccggcacctcagagtcggcaaccccggagtctggacccggaacttccgaaagtgccacaccagagtccggtcccgggacttcagaatcagcaacacccgagtccggccctgggtctgaacccgccacaagtggtagtgagacaccaggatcagaacctgctacctcagggtcagagacacccggatctccggcaggctcaccaacctccactgaggagggcaccagcacagaaccaagcgagggctccgcacccggaacaagcactgaacccagtgagggttcagcacccggctctgagccggccacaagtggcagtgagacacccggcacttcagagagtgccacccccgagagtggcccaggcactagtaccgagccctctgaaggcagtgcgccagcctcgagcgaacaaaaactcatctcagaagaggatctgtcacctgcaaccggtcatcatcaccatcaccattga

SEQ ID NO: 1359 - protein, 2095 aa, synthetic construct
  REGION 1..2095: note = Description of Artificial Sequence: Synthetic polypeptide
ATRRYYLGAVELSWDYMQSDLGELPVDARFPPRVPKSFPFNTSVVYKKTLFVEFTDHLFNIAKPRPPWMGLLGPTIQAEVYDTVVITLKNMASHPVSLHAVGVSYWKASEGAEYDDQTSQREKEDDKVFPGGSHTYVWQVLKENGPMASDPLCLTYSYLSHVDLVKDLNSGLIGALLVCREGSLAKEKGAPGSPAGSPTSTEEGTSESATPESGPGSEPATSGSETPASSTQTLHKFILLFAVFDEGKSWHSETKNSLMQDRDAASARAWPKMHTVNGYVNRSLPGLIGCHRKSVYWHVIGMGTTPEVHSIFLEGHTFLVRNHRQASLEISPITFLTAQTLLMDLGQFLLFCHISSHQHDGMEAYVKVDSCPEEPQLRMKNNEEAEDYDDDLTDSEMDVVRFDDDNSPSFIQIRSVAKKHPKTWVHYIAAEEEDWDYAPLVLAPDDRSYKSQYLNNGPQRIGRKYKKVRFMAYTDETFKTREAIQHESGILGPLLYGEVGDTLLIIFKNQASRPYNIYPHGITDVRPLYSRRLPKGVKHLKDFPILPGEIFKYKWTVTVEDGPTKSDPRCLTRYYSSFVNMERDLASGLIGPLLICYKESVDQRGNQIMSDKRNVILFSVFDENRSWYLTENIQRFLPNPAGVQLEDPEFQASNIMHSINGYVFDSLQLSVCLHEVAYWYILSIGAQTDFLSVFFSGYTFKHKMVYEDTLTLFPFSGETVFMSMENPGLWILGCHNSDFRNRGMTALLKVSSCDKNTGDYYEDSYEDISAYLLSKNNAIEPRSFSQNGAPSPAGSPTSTEEGTSESATPESGPGSEPATSGSETPGTSESATPESGPGTSTEPSEGSAPGTSTEPSEGSAPGTSTEPSEGSAPGTSTEPSEGSAPGTSTEPSEGSAPGTSTEPSEGSAPGSPAGSPTSTEEGTSTEPSEGSAPGASSPPVLKRHQAEITRTTLQSDQEEIDYDDTISVEMKKEDFDIYDEDENQSPRSFQKKTRHYFIAAVERLWDYGMSSSPHVLRNRAQSGSVPQFKKVVFQEFTDGSFTQPLYRGELNEHLGLLGPYIRAEVEDNIMVTFRNQASRPYSFYSSLISYEEDQRQGAEPRKNFVKPNETKTYFWKVQHHMAPTKDEFDCKAWAYFSDVDLEKDVHSGLIGPLLVCHTNTLNPAHGRQVTVQEFALFFTIFDETKSWYFTENMERNCRGAPTSESATPESGPGSEPATSGSETPGTSESATPESGPGSEPATSGSETPGTSESATPESGPGTSTEPSEGSAPGTSESATPESGPGSPAGSPTSTEEGSPAGSPTSTEEGSPAGSPTSTEEGTSESATPESGPGTSTEPSEGSAPGASSAPCNIQMEDPTFKENYRFHAINGYIMDTLPGLVMAQDQRIRWYLLSMGSNENIHSIHFSGHVFTVRKKEEYKMALYNLYPGVFETVEMLPSKAGIWRVECLIGEHLHAGMSTLFLVYSNKCQTPLGMASGHIRDFQITASGQYGQWAPKLARLHYSGSINAWSTKEPFSWIKVDLLAPMIIHGIKTQGARQKFSSLYISQFIIMYSLDGKKWQTYRGNSTGTLMVFFGNVDSSGIKHNIFNPPIIARYIRLHPTHYSIRSTLRMELMGCDLNSCSMPLGMESKAISDAQITASSYFTNMFATWSPSKARLHLQGRSNAWRPQVNNPKEWLQVDFQKTMKVTGVTTQGVKSLLTSMYVKEFLISSSQDGHQWTLFFQNGKVKVFQGNQDSFTPVVNSLDPPLLTRYLRIHPQSWVHQIALRMEVLGCEAQDLYGAPGTSESATPESGPGSEPATSGSETPGTSESATPESGPGSEPATSGSETPGTSESATPESGPGTSTEPSEGSAPGSPAGSPTSTEEGTSESATPESGPGSEPATSGSETPGTSESATPESGPGSPAGSPTSTEEGSPAGSPTSTEEGTSTEPSEGSAPGTSESATPESGPGTSESATPESGPGTSESATPESGPGSEPATSGSETPGSEPATSGSETPGSPAGSPTSTEEGTSTEPSEGSAPGTSTEPSEGSAPGSEPATSGSETPGTSESATPESGPGTSTEPSEGSAPASSEQKLISEEDLSPATGHHHHHH

SEQ ID NO: 1360 - DNA, 6288 bp, synthetic construct
  misc_feature 1..6288: note = Description of Artificial Sequence: Synthetic polynucleotide
  source 1..6288: mol_type = other DNA
gccaccagaagatactacctgggtgcagtggaactgtcatgggactatatgcaaagtgatctcggtgagctgcctgtggacgcaagatttcctcctagagtgccaaaatcttttccattcaacacctcagtcgtgtacaaaaagactctgtttgtagaattcacggatcaccttttcaacatcgctaagccaaggccaccctggatgggtctgctaggtcctaccatccaggctgaggtttatgatacagtggtcattacacttaagaacatggcttcccatcctgtcagtcttcatgctgttggtgtatcctactggaaagcttctgagggagctgaatatgatgatcagaccagtcaaagggagaaagaagatgataaagtcttccctggtggaagccatacatatgtctggcaggtcctgaaagagaatggtccaatggcctctgacccactgtgccttacctactcatatctttctcatgtggacctggtaaaagacttgaattcaggcctcattggagccctactagtatgtagagaagggagtctggccaaggaaaagggcgcgccaggttctcctgctggctcccccacctcaacagaagaggggacaagcgaaagcgctacgcctgagagtggccctggctctgagccagccacctccggctctgaaacccctgcctcgagcacacagaccttgcacaaatttatactactttttgctgtatttgatgaagggaaaagttggcactcagaaacaaagaactccttgatgcaggatagggatgctgcatctgctcgggcctggcctaaaatgcacacagtcaatggttatgtaaacaggtctctgccaggtctgattggatgccacaggaaatcagtctattggcatgtgattggaatgggcaccactcctgaagtgcactcaatattcctcgaaggtcacacatttcttgtgaggaaccatcgccaggctagcttggaaatctcgccaataactttccttactgctcaaacactcttgatggaccttggacagtttctactgttttgtcatatctcttcccaccaacatgatggcatggaagcttatgtcaaagtagacagctgtccagaggaaccccaactacgaatgaaaaataatgaagaagcggaagactatgatgatgatcttactgattctgaaatggatgtggtcaggtttgatgatgacaactctccttcctttatccaaattcgctcagttgccaagaagcatcctaaaacttgggtacattacattgctgctgaagaggaggactgggactatgctcccttagtcctcgcccccgatgacagaagttataaaagtcaatatttgaacaatggccctcagcggattggtaggaagtacaaaaaagtccgatttatggcatacacagatgaaacctttaagactcgtgaagctattcagcatgaatcaggaatcttgggacctttactttatggggaagttggagacacactgttgattatatttaagaatcaagcaagcagaccatataacatctaccctcacggaatcactgatgtccgtcctttgtattcaaggagattaccaaaaggtgtaaaacatttgaaggattttccaattctgccaggagaaatattcaaatataaatggacagtgactgtagaagatgggccaactaaatcagatcctcggtgcctgacccgctattactctagtttcgttaatatggagagagatctagcttcaggactcattggccctctcctcatctgctacaaagaatctgtagatcaaagaggaaaccagataatgtcagacaagaggaatgtcatcctgttttctgtatttgatgagaaccgaagctggtacctcacagagaatatacaacgctttctccccaatccagctggagtgcagcttgaggatccagagttccaagcctccaacatcatgcacagcatcaatggctatgtttttgatagtttgcagttgtcagtttgtttgcatgaggtggcatactggtacattctaagcattggagcacagactgacttcctttctgtcttcttctctggatataccttcaaacacaaaatggtctatgaagacacactcaccctattcccattctcaggagaaactgtcttcatgtcgatggaaaacccaggtctatggattctggggtgccacaactcagactttcggaacagaggcatgaccgccttactgaaggtttctagttgtgacaagaacactggtgattattacgaggacagttatgaagatatttcagcatacttgctgagtaaaaacaatgccattgaaccaagaagcttctctcaaaacggcgcgccaagtcccgctggaagcccaactagcaccgaagaggggacctcagagtccgccacccccgagtccggccctggctctgagcctgccactagcggctccgagactcctggcacatccgaaagcgctacacccgagagtggacccggcacctctaccgagcccagtgagggctccgcccctggaacaagcaccgagcccagcgaaggcagcgccccagggacctccacagagcccagtgaaggcagtgctcctggcaccagcaccgaaccaagcgagggctctgcacccgggacctccaccgagccaagcgaaggctctgcccctggcacttccaccgagcccagcgaaggcagcgcccctgggagccccgctggctctcccaccagcactgaggagggcacatctaccgaaccaagtgaaggctctgcaccaggtgcctcgagcccaccagtcttgaaacgccatcaagctgaaataactcgtactactcttcagtcagatcaagaggaaatcgattatgatgataccatatcagttgaaatgaagaaggaagattttgacatttatgatgaggatgaaaatcagagcccccgcagctttcaaaagaaaacacgacactattttattgctgcagtggagaggctctgggattatgggatgagtagctccccacatgttctaagaaacagggctcagagtggcagtgtccctcagttcaagaaagttgttttccaggaatttactgatggctcctttactcagcccttataccgtggagaactaaatgaacatttgggactcctggggccatatataagagcagaagttgaagataatatcatggtaactttcagaaatcaggcctctcgtccctattccttctattctagccttatttcttatgaggaagatcagaggcaaggagcagaacctagaaaaaactttgtcaagcctaatgaaaccaaaacttacttttggaaagtgcaacatcatatggcacccactaaagatgagtttgactgcaaagcctgggcttatttctctgatgttgacctggaaaaagatgtgcactcaggcctgattggaccccttctggtctgccacactaacacactgaaccctgctcatgggagacaagtgacagtacaggaatttgctctgtttttcaccatctttgatgagaccaaaagctggtacttcactgaaaatatggaaagaaactgcaggggcgcgccaacgtccgaaagtgctacccctgagtcaggccctggtagtgagcctgccacaagcggaagcgaaactccggggacctcagagtctgccactcccgaatcggggccaggctctgaaccggccacttcagggagcgaaacaccaggaacatcggagagcgctaccccggagagcgggccaggaactagtactgagcctagcgagggaagtgcacctggtacaagcgagtccgccacacccgagtctggccctggctctccagcgggctcacccacgagcactgaagagggctctcccgctggcagcccaacgtcgacagaagaaggatcaccagcaggctcccccacatcaacagaggagggtacatcagaatctgctactcccgagagtggacccggtacctccactgagcccagcgaggggagtgcaccaggtgcctcgagcgctccctgcaatatccagatggaagatcccacttttaaagagaattatcgcttccatgcaatcaatggctacataatggatacactacctggcttagtaatggctcaggatcaaaggattcgatggtatctgctcagcatgggcagcaatgaaaacatccattctattcatttcagtggacatgtgttcactgtacgaaaaaaagaggagtataaaatggcactgtacaatctctatccaggtgtttttgagacagtggaaatgttaccatccaaagctggaatttggcgggtggaatgccttattggcgagcatctacatgctgggatgagcacactttttctggtgtacagcaataagtgtcagactcccctgggaatggcttctggacacattagagattttcagattacagcttcaggacaatatggacagtgggccccaaagctggccagacttcattattccggatcaatcaatgcctggagcaccaaggagcccttttcttggatcaaggtggatctgttggcaccaatgattattcacggcatcaagacccagggtgcccgtcagaagttctccagcctctacatctctcagtttatcatcatgtatagtcttgatgggaagaagtggcagacttatcgaggaaattccactggaaccttaatggtcttctttggcaatgtggattcatctgggataaaacacaatatttttaaccctccaattattgctcgatacatccgtttgcacccaactcattatagcattcgcagcactcttcgcatggagttgatgggctgtgatttaaatagttgcagcatgccattgggaatggagagtaaagcaatatcagatgcacagattactgcttcatcctactttaccaatatgtttgccacctggtctccttcaaaagctcgacttcacctccaagggaggagtaatgcctggagacctcaggtgaataatccaaaagagtggctgcaagtggacttccagaagacaatgaaagtcacaggagtaactactcagggagtaaaatctctgcttaccagcatgtatgtgaaggagttcctcatctccagcagtcaagatggccatcagtggactctcttttttcagaatggcaaagtaaaggtttttcagggaaatcaagactccttcacacctgtggtgaactctctagacccaccgttactgactcgctaccttcgaattcacccccagagttgggtgcaccagattgccctgaggatggaggttctgggctgcgaggcacaggacctctacggcgcgccaggtacctcagagtctgctacccccgagtcagggccaggatcagagccagccacctccgggtctgagacacccgggacttccgagagtgccacccctgagtccggacccgggtccgagcccgccacttccggctccgaaactcccggcacaagcgagagcgctaccccagagtcaggaccaggaacatctacagagccctctgaaggctccgctccagggtccccagccggcagtcccactagcaccgaggagggaacctctgaaagcgccacacccgaatcagggccagggtctgagcctgctaccagcggcagcgagacaccaggcacctctgagtccgccacaccagagtccggacccggatctcccgctgggagccccacctccactgaggagggatctcctgctggctctccaacatctactgaggaaggtacctcaaccgagccatccgagggatcagctcccggcacctcagagtcggcaaccccggagtctggacccggaacttccgaaagtgccacaccagagtccggtcccgggacttcagaatcagcaacacccgagtccggccctgggtctgaacccgccacaagtggtagtgagacaccaggatcagaacctgctacctcagggtcagagacacccggatctccggcaggctcaccaacctccactgaggagggcaccagcacagaaccaagcgagggctccgcacccggaacaagcactgaacccagtgagggttcagcacccggctctgagccggccacaagtggcagtgagacacccggcacttcagagagtgccacccccgagagtggcccaggcactagtaccgagccctctgaaggcagtgcgccagcctcgagcgaacaaaaactcatctcagaagaggatctgtcacctgcaaccggtcatcatcaccatcaccattga

SEQ ID NO: 1361 - protein, 2095 aa, synthetic construct
  REGION 1..2095: note = Description of Artificial Sequence: Synthetic polypeptide
ATRRYYLGAVELSWDYMQSDLGELPVDARFPPRVPKSFPFNTSVVYKKTLFVEFTDHLFNIAKPRPPWMGLLGPTIQAEVYDTVVITLKNMASHPVSLHAVGVSYWKASEGAEYDDQTSQREKEDDKVFPGGSHTYVWQVLKENGPMASDPLCLTYSYLSHVDLVKDLNSGLIGALLVCREGSLAKEKTQTLHKFILLFAVFDEGKSWHSETKNSLMQDRDAASARAWPKMHTVNGYVNRSLPGLIGCHRKSVYWHVIGMGTTPEVHSIFLEGHTFLVRNHRQASLEISPITFLTAQTLLMDLGQFLLFCHISSHQHDGMEAYVKVDSCPEEPQLRMKNNEEAEDYDDDLTDSEMDVVRFDDDNSPSFIQIRSVAKKHPKTWVHYIAAEEEDWDYAPLVLAPDDRSYKSQYLNNGPQRIGRKYKKVRFMAYTDETFKTREAIQHESGILGPLLYGEVGDTLLIIFKNQASRPYNIYPHGITDVRPLYSRRLPKGVKHLKDFPILPGEIFKYKWTVTVEDGPTKSDPRCLTRYYSSFVNMERDLASGLIGPLLICYKESVDQRGNQIMSDKRNVILFSVFDENRSWYLTENIQRFLPNPAGAPGSPAGSPTSTEEGTSESATPESGPGSEPATSGSETPASSGVQLEDPEFQASNIMHSINGYVFDSLQLSVCLHEVAYWYILSIGAQTDFLSVFFSGYTFKHKMVYEDTLTLFPFSGETVFMSMENPGLWILGCHNSDFRNRGMTALLKVSSCDKNTGDYYEDSYEDISAYLLSKNNAIEPRSFSQNGAPSPAGSPTSTEEGTSESATPESGPGSEPATSGSETPGTSESATPESGPGTSTEPSEGSAPGTSTEPSEGSAPGTSTEPSEGSAPGTSTEPSEGSAPGTSTEPSEGSAPGTSTEPSEGSAPGSPAGSPTSTEEGTSTEPSEGSAPGASSPPVLKRHQAEITRTTLQSDQEEIDYDDTISVEMKKEDFDIYDEDENQSPRSFQKKTRHYFIAAVERLWDYGMSSSPHVLRNRAQSGSVPQFKKVVFQEFTDGSFTQPLYRGELNEHLGLLGPYIRAEVEDNIMVTFRNQASRPYSFYSSLISYEEDQRQGAEPRKNFVKPNETKTYFWKVQHHMAPTKDEFDCKAWAYFSDVDLEKDVHSGLIGPLLVCHTNTLNPAHGRQVTVQEFALFFTIFDETKSWYFTENMERNCRGAPTSESATPESGPGSEPATSGSETPGTSESATPESGPGSEPATSGSETPGTSESATPESGPGTSTEPSEGSAPGTSESATPESGPGSPAGSPTSTEEGSPAGSPTSTEEGSPAGSPTSTEEGTSESATPESGPGTSTEPSEGSAPGASSAPCNIQMEDPTFKENYRFHAINGYIMDTLPGLVMAQDQRIRWYLLSMGSNENIHSIHFSGHVFTVRKKEEYKMALYNLYPGVFETVEMLPSKAGIWRVECLIGEHLHAGMSTLFLVYSNKCQTPLGMASGHIRDFQITASGQYGQWAPKLARLHYSGSINAWSTKEPFSWIKVDLLAPMIIHGIKTQGARQKFSSLYISQFIIMYSLDGKKWQTYRGNSTGTLMVFFGNVDSSGIKHNIFNPPIIARYIRLHPTHYSIRSTLRMELMGCDLNSCSMPLGMESKAISDAQITASSYFTNMFATWSPSKARLHLQGRSNAWRPQVNNPKEWLQVDFQKTMKVTGVTTQGVKSLLTSMYVKEFLISSSQDGHQWTLFFQNGKVKVFQGNQDSFTPVVNSLDPPLLTRYLRIHPQSWVHQIALRMEVLGCEAQDLYGAPGTSESATPESGPGSEPATSGSETPGTSESATPESGPGSEPATSGSETPGTSESATPESGPGTSTEPSEGSAPGSPAGSPTSTEEGTSESATPESGPGSEPATSGSETPGTSESATPESGPGSPAGSPTSTEEGSPAGSPTSTEEGTSTEPSEGSAPGTSESATPESGPGTSESATPESGPGTSESATPESGPGSEPATSGSETPGSEPATSGSETPGSPAGSPTSTEEGTSTEPSEGSAPGTSTEPSEGSAPGSEPATSGSETPGTSESATPESGPGTSTEPSEGSAPASSEQKLISEEDLSPATGHHHHHH

SEQ ID NO: 1362 - DNA, 6288 bp, synthetic construct
  misc_feature 1..6288: note = Description of Artificial Sequence: Synthetic polynucleotide
  source 1..6288: mol_type = other DNA
gccaccagaagatactacctgggtgcagtggaactgtcatgggactatatgcaaagtgatctcggtgagctgcctgtggacgcaagatttcctcctagagtgccaaaatcttttccattcaacacctcagtcgtgtacaaaaagactctgtttgtagaattcacggatcaccttttcaacatcgctaagccaaggccaccctggatgggtctgctaggtcctaccatccaggctgaggtttatgatacagtggtcattacacttaagaacatggcttcccatcctgtcagtcttcatgctgttggtgtatcctactggaaagcttctgagggagctgaatatgatgatcagaccagtcaaagggagaaagaagatgataaagtcttccctggtggaagccatacatatgtctggcaggtcctgaaagagaatggtccaatggcctctgacccactgtgccttacctactcatatctttctcatgtggacctggtaaaagacttgaattcaggcctcattggagccctactagtatgtagagaagggagtctggccaaggaaaagacacagaccttgcacaaatttatactactttttgctgtatttgatgaagggaaaagttggcactcagaaacaaagaactccttgatgcaggatagggatgctgcatctgctcgggcctggcctaaaatgcacacagtcaatggttatgtaaacaggtctctgccaggtctgattggatgccacaggaaatcagtctattggcatgtgattggaatgggcaccactcctgaagtgcactcaatattcctcgaaggtcacacatttcttgtgaggaaccatcgccaggctagcttggaaatctcgccaataactttccttactgctcaaacactcttgatggaccttggacagtttctactgttttgtcatatctcttcccaccaacatgatggcatggaagcttatgtcaaagtagacagctgtccagaggaaccccaactacgaatgaaaaataatgaagaagcggaagactatgatgatgatcttactgattctgaaatggatgtggtcaggtttgatgatgacaactctccttcctttatccaaattcgctcagttgccaagaagcatcctaaaacttgggtacattacattgctgctgaagaggaggactgggactatgctcccttagtcctcgcccccgatgacagaagttataaaagtcaatatttgaacaatggccctcagcggattggtaggaagtacaaaaaagtccgatttatggcatacacagatgaaacctttaagactcgtgaagctattcagcatgaatcaggaatcttgggacctttactttatggggaagttggagacacactgttgattatatttaagaatcaagcaagcagaccatataacatctaccctcacggaatcactgatgtccgtcctttgtattcaaggagattaccaaaaggtgtaaaacatttgaaggattttccaattctgccaggagaaatattcaaatataaatggacagtgactgtagaagatgggccaactaaatcagatcctcggtgcctgacccgctattactctagtttcgttaatatggagagagatctagcttcaggactcattggccctctcctcatctgctacaaagaatctgtagatcaaagaggaaaccagataatgtcagacaagaggaatgtcatcctgttttctgtatttgatgagaaccgaagctggtacctcacagagaatatacaacgctttctccccaatccagctggcgcgccaggttctcctgctggctcccccacctcaacagaagaggggacaagcgaaagcgctacgcctgagagtggccctggctctgagccagccacctccggctctgaaacccctgcctcgagcggagtgcagcttgaggatccagagttccaagcctccaacatcatgcacagcatcaatggctatgtttttgatagtttgcagttgtcagtttgtttgcatgaggtggcatactggtacattctaagcattggagcacagactgacttcctttctgtcttcttctctggatataccttcaaacacaaaatggtctatgaagacacactcaccctattcccattctcaggagaaactgtcttcatgtcgatggaaaacccaggtctatggattctggggtgccacaactcagactttcggaacagaggcatgaccgccttactgaaggtttctagttgtgacaagaacactggtgattattacgaggacagttatgaagatatttcagcatacttgctgagtaaaaacaatgccattgaaccaagaagcttctctcaaaacggcgcgccaagtcccgctggaagcccaactagcaccgaagaggggacctcagagtccgccacccccgagtccggccctggctctgagcctgccactagcggctccgagactcctggcacatccgaaagcgctacacccgagagtggacccggcacctctaccgagcccagtgagggctccgcccctggaacaagcaccgagcccagcgaaggcagcgccccagggacctccacagagcccagtgaaggcagtgctcctggcaccagcaccgaaccaagcgagggctctgcacccgggacctccaccgagccaagcgaaggctctgcccctggcacttccaccgagcccagcgaaggcagcgcccctgggagccccgctggctctcccaccagcactgaggagggcacatctaccgaaccaagtgaaggctctgcaccaggtgcctcgagcccaccagtcttgaaacgccatcaagctgaaataactcgtactactcttcagtcagatcaagaggaaatcgattatgatgataccatatcagttgaaatgaagaaggaagattttgacatttatgatgaggatgaaaatcagagcccccgcagctttcaaaagaaaacacgacactattttattgctgcagtggagaggctctgggattatgggatgagtagctccccacatgttctaagaaacagggctcagagtggcagtgtccctcagttcaagaaagttgttttccaggaatttactgatggctcctttactcagcccttataccgtggagaactaaatgaacatttgggactcctggggccatatataagagcagaagttgaagataatatcatggtaactttcagaaatcaggcctctcgtccctattccttctattctagccttatttcttatgaggaagatcagaggcaaggagcagaacctagaaaaaactttgtcaagcctaatgaaaccaaaacttacttttggaaagtgcaacatcatatggcacccactaaagatgagtttgactgcaaagcctgggcttatttctctgatgttgacctggaaaaagatgtgcactcaggcctgattggaccccttctggtctgccacactaacacactgaaccctgctcatgggagacaagtgacagtacaggaatttgctctgtttttcaccatctttgatgagaccaaaagctggtacttcactgaaaatatggaaagaaactgcaggggcgcgccaacgtccgaaagtgctacccctgagtcaggccctggtagtgagcctgccacaagcggaagcgaaactccggggacctcagagtctgccactcccgaatcggggccaggctctgaaccggccacttcagggagcgaaacaccaggaacatcggagagcgctaccccggagagcgggccaggaactagtactgagcctagcgagggaagtgcacctggtacaagcgagtccgccacacccgagtctggccctggctctccagcgggctcacccacgagcactgaagagggctctcccgctggcagcccaacgtcgacagaagaaggatcaccagcaggctcccccacatcaacagaggagggtacatcagaatctgctactcccgagagtggacccggtacctccactgagcccagcgaggggagtgcaccaggtgcctcgagcgctccctgcaatatccagatggaagatcccacttttaaagagaattatcgcttccatgcaatcaatggctacataatggatacactacctggcttagtaatggctcaggatcaaaggattcgatggtatctgctcagcatgggcagcaatgaaaacatccattctattcatttcagtggacatgtgttcactgtacgaaaaaaagaggagtataaaatggcactgtacaatctctatccaggtgtttttgagacagtggaaatgttaccatccaaagctggaatttggcgggtggaatgccttattggcgagcatctacatgctgggatgagcacactttttctggtgtacagcaataagtgtcagactcccctgggaatggcttctggacacattagagattttcagattacagcttcaggacaatatggacagtgggccccaaagctggccagacttcattattccggatcaatcaatgcctggagcaccaaggagcccttttcttggatcaaggtggatctgttggcaccaatgattattcacggcatcaagacccagggtgcccgtcagaagttctccagcctctacatctctcagtttatcatcatgtatagtcttgatgggaagaagtggcagacttatcgaggaaattccactggaaccttaatggtcttctttggcaatgtggattcatctgggataaaacacaatatttttaaccctccaattattgctcgatacatccgtttgcacccaactcattatagcattcgcagcactcttcgcatggagttgatgggctgtgatttaaatagttgcagcatgccattgggaatggagagtaaagcaatatcagatgcacagattactgcttcatcctactttaccaatatgtttgccacctggtctccttcaaaagctcgacttcacctccaagggaggagtaatgcctggagacctcaggtgaataatccaaaagagtggctgcaagtggacttccagaagacaatgaaagtcacaggagtaactactcagggagtaaaatctctgcttaccagcatgtatgtgaaggagttcctcatctccagcagtcaagatggccatcagtggactctcttttttcagaatggcaaagtaaaggtttttcagggaaatcaagactccttcacacctgtggtgaactctctagacccaccgttactgactcgctaccttcgaattcacccccagagttgggtgcaccagattgccctgaggatggaggttctgggctgcgaggcacaggacctctacggcgcgccaggtacctcagagtctgctacccccgagtcagggccaggatcagagccagccacctccgggtctgagacacccgggacttccgagagtgccacccctgagtccggacccgggtccgagcccgccacttccggctccgaaactcccggcacaagcgagagcgctaccccagagtcaggaccaggaacatctacagagccctctgaaggctccgctccagggtccccagccggcagtcccactagcaccgaggagggaacctctgaaagcgccacacccgaatcagggccagggtctgagcctgctaccagcggcagcgagacaccaggcacctctgagtccgccacaccagagtccggacccggatctcccgctgggagccccacctccactgaggagggatctcctgctggctctccaacatctactgaggaaggtacctcaaccgagccatccgagggatcagctcccggcacctcagagtcggcaaccccggagtctggacccggaacttccgaaagtgccacaccagagtccggtcccgggacttcagaatcagcaacacccgagtccggccctgggtctgaacccgccacaagtggtagtgagacaccaggatcagaacctgctacctcagggtcagagacacccggatctccggcaggctcaccaacctccactgaggagggcaccagcacagaaccaagcgagggctccgcacccggaacaagcactgaacccagtgagggttcagcacccggctctgagccggccacaagtggcagtgagacacccggcacttcagagagtgccacccccgagagtggcccaggcactagtaccgagccctctgaaggcagtgcgccagcctcgagcgaacaaaaactcatctcagaagaggatctgtcacctgcaaccggtcatcatcaccatcaccattga

SEQ ID NO: 1363 - protein, 2095 aa, synthetic construct
  REGION 1..2095: note = Description of Artificial Sequence: Synthetic polypeptide
ATRRYYLGAVELSWDYMQSDLGELPVDARFPPRVPKSFPFNTSVVYKKTLFVEFTDHLFNIAKPRPPWMGLLGPTIQAEVYDTVVITLKNMASHPVSLHAVGVSYWKASEGAEYDDQTSQREKEDDKVFPGGSHTYVWQVLKENGPMASDPLCLTYSYLSHVDLVKDLNSGLIGALLVCREGSLAKEKTQTLHKFILLFAVFDEGKSWHSETKNSLMQDRDAASARAWPKMHTVNGYVNRSLPGLIGCHRKSVYWHVIGMGTTPEVHSIFLEGHTFLVRNHRQASLEISPITFLTAQTLLMDLGQFLLFCHISSHQHDGMEAYVKVDSCPEEPQLRMKNNEEAEDYDDDLTDSEMDVVRFDDDNSPSFIQIRSVAKKHPKTWVHYIAAEEEDWDYAPLVLAPDDRSYKSQYLNNGPQRIGRKYKKVRFMAYTDETFKTREAIQHESGILGPLLYGEVGDTLLIIFKNQASRPYNIYPHGITDVRPLYSRRLPKGVKHLKDFPILPGEIFKYKWTVTVEDGPTKSDPRCLTRYYSSFVNMERDLASGLIGPLLICYKESVDQRGNQIMSDKRNVILFSVFDENRSWYLTENIQRFLPNPAGVQLEDPEFQASNIMHSINGYVFDSLQLSVCLHEVAYWYILSIGAQTDFLSVFFSGYTFKHKMVYEDTLTLFPFSGETVFMSMENPGLWILGCHNSDFRNRGMTALLKVSSCDKNTGDYYEDSYEDISAYLLSKNNAIEPRSFSQNGAPSPAGSPTSTEEGTSESATPESGPGSEPATSGSETPGTSESATPESGPGTSTEPSEGSAPGTSTEPSEGSAPGTSTEPSEGSAPGTSTEPSEGSAPGTSTEPSEGSAPGTSTEPSEGSAPGSPAGSPTSTEEGTSTEPSEGSAPGASSPPVLKRHQAEITRTTLQSDQEEIDYDDTISVEMKKEDFDIYDEDENQSPRSFQKKTRHYFIAAVERLWDYGMSSSPHVLRNRAQSGSVPQFKKVVFQEFTDGSFTQPLYRGELNEHLGLLGPYIRAEVEDNIMVTFRNQASRPYSFYSSLISYEEDQRQGAEPRKNFVKPNETKTYFWKVQHHMAPTKDEFDCKAWAYFSDVDLEKDVHSGLIGPLLVCHTNTLNPAHGRQVTVQEFALFFTIFDETKSWYFTENMERNCRGAPTSESATPESGPGSEPATSGSETPGTSESATPESGPGSEPATSGSETPGTSESATPESGPGTSTEPSEGSAPGTSESATPESGPGSPAGSPTSTEEGSPAGSPTSTEEGSPAGSPTSTEEGTSESATPESGPGTSTEPSEGSAPGASSAPCNIQMEDPTFKENYRFHAINGYIMDTLPGLVMAQDQRIRWYLLSMGSNENIHSIHFSGHVFTVRKKEEYKMALYNLYPGVFETVEMLPSKAGIWRVECLIGEHLHAGMSTLFLVYSNKCQTPLGMASGHIRDFQITASGQYGQWAPKLARLHYSGSINAWSTKEPFGAPGSPAGSPTSTEEGTSESATPESGPGSEPATSGSETPASSSWIKVDLLAPMIIHGIKTQGARQKFSSLYISQFIIMYSLDGKKWQTYRGNSTGTLMVFFGNVDSSGIKHNIFNPPIIARYIRLHPTHYSIRSTLRMELMGCDLNSCSMPLGMESKAISDAQITASSYFTNMFATWSPSKARLHLQGRSNAWRPQVNNPKEWLQVDFQKTMKVTGVTTQGVKSLLTSMYVKEFLISSSQDGHQWTLFFQNGKVKVFQGNQDSFTPVVNSLDPPLLTRYLRIHPQSWVHQIALRMEVLGCEAQDLYGAPGTSESATPESGPGSEPATSGSETPGTSESATPESGPGSEPATSGSETPGTSESATPESGPGTSTEPSEGSAPGSPAGSPTSTEEGTSESATPESGPGSEPATSGSETPGTSESATPESGPGSPAGSPTSTEEGSPAGSPTSTEEGTSTEPSEGSAPGTSESATPESGPGTSESATPESGPGTSESATPESGPGSEPATSGSETPGSEPATSGSETPGSPAGSPTSTEEGTSTEPSEGSAPGTSTEPSEGSAPGSEPATSGSETPGTSESATPESGPGTSTEPSEGSAPASSEQKLISEEDLSPATGHHHHHH

SEQ ID NO: 1364 - DNA, 6288 bp, synthetic construct
  misc_feature 1..6288: note = Description of Artificial Sequence: Synthetic polynucleotide
  source 1..6288: mol_type = other DNA
gccaccagaagatactacctgggtgcagtggaactgtcatgggactatatgcaaagtgatctcggtgagctgcctgtggacgcaagatttcctcctagagtgccaaaatcttttccattcaacacctcagtcgtgtacaaaaagactctgtttgtagaattcacggatcaccttttcaacatcgctaagccaaggccaccctggatgggtctgctaggtcctaccatccaggctgaggtttatgatacagtggtcattacacttaagaacatggcttcccatcctgtcagtcttcatgctgttggtgtatcctactggaaagcttctgagggagctgaatatgatgatcagaccagtcaaagggagaaagaagatgataaagtcttccctggtggaagccatacatatgtctggcaggtcctgaaagagaatggtccaatggcctctgacccactgtgccttacctactcatatctttctcatgtggacctggtaaaagacttgaattcaggcctcattggagccctactagtatgtagagaagggagtctggccaaggaaaagacacagaccttgcacaaatttatactactttttgctgtatttgatgaagggaaaagttggcactcagaaacaaagaactccttgatgcaggatagggatgctgcatctgctcgggcctggcctaaaatgcacacagtcaatggttatgtaaacaggtctctgccaggtctgattggatgccacaggaaatcagtctattggcatgtgattggaatgggcaccactcctgaagtgcactcaatattcctcgaaggtcacacatttcttgtgaggaaccatcgccaggctagcttggaaatctcgccaataactttccttactgctcaaacactcttgatggaccttggacagtttctactgttttgtcatatctcttcccaccaacatgatggcatggaagcttatgtcaaagtagacagctgtccagaggaaccccaactacgaatgaaaaataatgaagaagcggaagactatgatgatgatcttactgattctgaaatggatgtggtcaggtttgatgatgacaactctccttcctttatccaaattcgctcagttgccaagaagcatcctaaaacttgggtacattacattgctgctgaagaggaggactgggactatgctcccttagtcctcgcccccgatgacagaagttataaaagtcaatatttgaacaatggccctcagcggattggtaggaagtacaaaaaagtccgatttatggcatacacagatgaaacctttaagactcgtgaagctattcagcatgaatcaggaatcttgggacctttactttatggggaagttggagacacactgttgattatatttaagaatcaagcaagcagaccatataacatctaccctcacggaatcactgatgtccgtcctttgtattcaaggagattaccaaaaggtgtaaaacatttgaaggattttccaattctgccaggagaaatattcaaatataaatggacagtgactgtagaagatgggccaactaaatcagatcctcggtgcctgacccgctattactctagtttcgttaatatggagagagatctagcttcaggactcattggccctctcctcatctgctacaaagaatctgtagatcaaagaggaaaccagataatgtcagacaagaggaatgtcatcctgttttctgtatttgatgagaaccgaagctggtacctcacagagaatatacaacgctttctccccaatccagctggagtgcagcttgaggatccagagttccaagcctccaacatcatgcacagcatcaatggctatgtttttgatagtttgcagttgtcagtttgtttgcatgaggtggcatactggtacattctaagcattggagcacagactgacttcctttctgtcttcttctctggatataccttcaaacacaaaatggtctatgaagacacactcaccctattcccattctcaggagaaactgtcttcatgtcgatggaaaacccaggtctatggattctggggtgccacaactcagactttcggaacagaggcatgaccgccttactgaaggtttctagttgtgacaagaacactggtgattattacgaggacagttatgaagatatttcagcatacttgctgagtaaaaacaatgccattgaaccaagaagcttctctcaaaacggcgcgccaagtcccgctggaagcccaactagcaccgaagaggggacctcagagtccgccacccccgagtccggccctggctctgagcctgccactagcggctccgagactcctggcacatccgaaagcgctacacccgagagtggacccggcacctctaccgagcccagtgagggctccgcccctggaacaagcaccgagcccagcgaaggcagcgccccagggacctccacagagcccagtgaaggcagtgctcctggcaccagcaccgaaccaagcgagggctctgcacccgggacctccaccgagccaagcgaaggctctgcccctggcacttccaccgagcccagcgaaggcagcgcccctgggagccccgctggctctcccaccagcactgaggagggcacatctaccgaaccaagtgaaggctctgcaccaggtgcctcgagcccaccagtcttgaaacgccatcaagctgaaataactcgtactactcttcagtcagatcaagaggaaatcgattatgatgataccatatcagttgaaatgaagaaggaagattttgacatttatgatgaggatgaaaatcagagcccccgcagctttcaaaagaaaacacgacactattttattgctgcagtggagaggctctgggattatgggatgagtagctccccacatgttctaagaaacagggctcagagtggcagtgtccctcagttcaagaaagttgttttccaggaatttactgatggctcctttactcagcccttataccgtggagaactaaatgaacatttgggactcctggggccatatataagagcagaagttgaagataatatcatggtaactttcagaaatcaggcctctcgtccctattccttctattctagccttatttcttatgaggaagatcagaggcaaggagcagaacctagaaaaaactttgtcaagcctaatgaaaccaaaacttacttttggaaagtgcaacatcatatggcacccactaaagatgagtttgactgcaaagcctgggcttatttctctgatgttgacctggaaaaagatgtgcactcaggcctgattggaccccttctggtctgccacactaacacactgaaccctgctcatgggagacaagtgacagtacaggaatttgctctgtttttcaccatctttgatgagaccaaaagctggtacttcactgaaaatatggaaagaaactgcaggggcgcgccaacgtccgaaagtgctacccctgagtcaggccctggtagtgagcctgccacaagcggaagcgaaactccggggacctcagagtctgccactcccgaatcggggccaggctctgaaccggccacttcagggagcgaaacaccaggaacatcggagagcgctaccccggagagcgggccaggaactagtactgagcctagcgagggaagtgcacctggtacaagcgagtccgccacacccgagtctggccctggctctccagcgggctcacccacgagcactgaagagggctctcccgctggcagcccaacgtcgacagaagaaggatcaccagcaggctcccccacatcaacagaggagggtacatcagaatctgctactcccgagagtggacccggtacctccactgagcccagcgaggggagtgcaccaggtgcctcgagcgctccctgcaatatccagatggaagatcccacttttaaagagaattatcgcttccatgcaatcaatggctacataatggatacactacctggcttagtaatggctcaggatcaaaggattcgatggtatctgctcagcatgggcagcaatgaaaacatccattctattcatttcagtggacatgtgttcactgtacgaaaaaaagaggagtataaaatggcactgtacaatctctatccaggtgtttttgagacagtggaaatgttaccatccaaagctggaatttggcgggtggaatgccttattggcgagcatctacatgctgggatgagcacactttttctggtgtacagcaataagtgtcagactcccctgggaatggcttctggacacattagagattttcagattacagcttcaggacaatatggacagtgggccccaaagctggccagacttcattattccggatcaatcaatgcctggagcaccaaggagccctttggcgcgccaggttctcctgctggctcccccacctcaacagaagaggggacaagcgaaagcgctacgcctgagagtggccctggctctgagccagccacctccggctctgaaacccctgcctcgagctcttggatcaaggtggatctgttggcaccaatgattattcacggcatcaagacccagggtgcccgtcagaagttctccagcctctacatctctcagtttatcatcatgtatagtcttgatgggaagaagtggcagacttatcgaggaaattccactggaaccttaatggtcttctttggcaatgtggattcatctgggataaaacacaatatttttaaccctccaattattgctcgatacatccgtttgcacccaactcattatagcattcgcagcactcttcgcatggagttgatgggctgtgatttaaatagttgcagcatgccattgggaatggagagtaaagcaatatcagatgcacagattactgcttcatcctactttaccaatatgtttgccacctggtctccttcaaaagctcgacttcacctccaagggaggagtaatgcctggagacctcaggtgaataatccaaaagagtggctgcaagtggacttccagaagacaatgaaagtcacaggagtaactactcagggagtaaaatctctgcttaccagcatgtatgtgaaggagttcctcatctccagcagtcaagatggccatcagtggactctcttttttcagaatggcaaagtaaaggtttttcagggaaatcaagactccttcacacctgtggtgaactctctagacccaccgttactgactcgctaccttcgaattcacccccagagttgggtgcaccagattgccctgaggatggaggttctgggctgcgaggcacaggacctctacggcgcgccaggtacctcagagtctgctacccccgagtcagggccaggatcagagccagccacctccgggtctgagacacccgggacttccgagagtgccacccctgagtccggacccgggtccgagcccgccacttccggctccgaaactcccggcacaagcgagagcgctaccccagagtcaggaccaggaacatctacagagccctctgaaggctccgctccagggtccccagccggcagtcccactagcaccgaggagggaacctctgaaagcgccacacccgaatcagggccagggtctgagcctgctaccagcggcagcgagacaccaggcacctctgagtccgccacaccagagtccggacccggatctcccgctgggagccccacctccactgaggagggatctcctgctggctctccaacatctactgaggaaggtacctcaaccgagccatccgagggatcagctcccggcacctcagagtcggcaaccccggagtctggacccggaacttccgaaagtgccacaccagagtccggtcccgggacttcagaatcagcaacacccgagtccggccctgggtctgaacccgccacaagtggtagtgagacaccaggatcagaacctgctacctcagggtcagagacacccggatctccggcaggctcaccaacctccactgaggagggcaccagcacagaaccaagcgagggctccgcacccggaacaagcactgaacccagtgagggttcagcacccggctctgagccggccacaagtggcagtgagacacccggcacttcagagagtgccacccccgagagtggcccaggcactagtaccgagccctctgaaggcagtgcgccagcctcgagcgaacaaaaactcatctcagaagaggatctgtcacctgcaaccggtcatcatcaccatcaccattga

SEQ ID NO: 1365 - protein, 2095 aa, synthetic construct
  REGION 1..2095: note = Description of Artificial Sequence: Synthetic polypeptide
ATRRYYLGAVELSWDYMQSDLGELPVDARFPPRVPKSFPFNTSVVYKKTLFVEFTDHLFNIAKPRPPWMGLLGPTIQAEVYDTVVITLKNMASHPVSLHAVGVSYWKASEGAEYDDQTSQREKEDDKVFPGGSHTYVWQVLKENGPMASDPLCLTYSYLSHVDLVKDLNSGLIGALLVCREGSLAKEKTQTLHKFILLFAVFDEGKSWHSETKNSLMQDRDAASARAWPKMHTVNGYVNRSLPGLIGCHRKSVYWHVIGMGTTPEVHSIFLEGHTFLVRNHRQASLEISPITFLTAQTLLMDLGQFLLFCHISSHQHDGMEAYVKVDSCPEEPQLRMKNNEEAEDYDDDLTDSEMDVVRFDDDNSPSFIQIRSVAKKHPKTWVHYIAAEEEDWDYAPLVLAPDDRSYKSQYLNNGPQRIGRKYKKVRFMAYTDETFKTREAIQHESGILGPLLYGEVGDTLLIIFKNQASRPYNIYPHGITDVRPLYSRRLPKGVKHLKDFPILPGEIFKYKWTVTVEDGPTKSDPRCLTRYYSSFVNMERDLASGLIGPLLICYKESVDQRGNQIMSDKRNVILFSVFDENRSWYLTENIQRFLPNPAGVQLEDPEFQASNIMHSINGYVFDSLQLSVCLHEVAYWYILSIGAQTDFLSVFFSGYTFKHKMVYEDTLTLFPFSGETVFMSMENPGLWILGCHNSDFRNRGMTALLKVSSCDKNTGDYYEDSYEDISAYLLSKNNAIEPRSFSQNGAPSPAGSPTSTEEGTSESATPESGPGSEPATSGSETPGTSESATPESGPGTSTEPSEGSAPGTSTEPSEGSAPGTSTEPSEGSAPGTSTEPSEGSAPGTSTEPSEGSAPGTSTEPSEGSAPGSPAGSPTSTEEGTSTEPSEGSAPGASSPPVLKRHQAEITRTTLQSDQEEIDYDDTISVEMKKEDFDIYDEDENQSPRSFQKKTRHYFIAAVERLWDYGMSSSPHVLRNRAQSGSVPQFKKVVFQEFTDGSFTQPLYRGELNEHLGLLGPYIRAEVEDNIMVTFRNQASRPYSFYSSLISYEEDQRQGAEPRKNFVKPNETKTYFWKVQHHMAPTKDEFDCKAWAYFSDVDLEKDVHSGLIGPLLVCHTNTLNPAHGRQVTVQEFALFFTIFDETKSWYFTENMERNCRGAPTSESATPESGPGSEPATSGSETPGTSESATPESGPGSEPATSGSETPGTSESATPESGPGTSTEPSEGSAPGTSESATPESGPGSPAGSPTSTEEGSPAGSPTSTEEGSPAGSPTSTEEGTSESATPESGPGTSTEPSEGSAPGASSAPCNIQMEDPTFKENYRFHAINGYIMDTLPGLVMAQDQRIRWYLLSMGSNENIHSIHFSGHVFTVRKKEEYKMALYNLYPGVFETVEMLPSKAGIWRVECLIGEHLHAGMSTLFLVYSNKCQTPLGMASGHIRDFQITASGQYGQWAPKLARLHYSGSINAWSTKEPFSWIKVDLLAPMIIHGIKTQGARQKFSSLYISQFIIMYSLDGKKWQTYRGNSTGTLMVFFGNVDSSGIKHNIFNPPIIARYIRLHPTHYSIRSTLRMELMGCDLGAPGSPAGSPTSTEEGTSESATPESGPGSEPATSGSETPASSNSCSMPLGMESKAISDAQITASSYFTNMFATWSPSKARLHLQGRSNAWRPQVNNPKEWLQVDFQKTMKVTGVTTQGVKSLLTSMYVKEFLISSSQDGHQWTLFFQNGKVKVFQGNQDSFTPVVNSLDPPLLTRYLRIHPQSWVHQIALRMEVLGCEAQDLYGAPGTSESATPESGPGSEPATSGSETPGTSESATPESGPGSEPATSGSETPGTSESATPESGPGTSTEPSEGSAPGSPAGSPTSTEEGTSESATPESGPGSEPATSGSETPGTSESATPESGPGSPAGSPTSTEEGSPAGSPTSTEEGTSTEPSEGSAPGTSESATPESGPGTSESATPESGPGTSESATPESGPGSEPATSGSETPGSEPATSGSETPGSPAGSPTSTEEGTSTEPSEGSAPGTSTEPSEGSAPGSEPATSGSETPGTSESATPESGPGTSTEPSEGSAPASSEQKLISEEDLSPATGHHHHHH

SEQ ID NO: 1366 - DNA, 6288 bp, synthetic construct
  misc_feature 1..6288: note = Description of Artificial Sequence: Synthetic polynucleotide
  source 1..6288: mol_type = other DNA
gccaccagaagatactacctgggtgcagtggaactgtcatgggactatatgcaaagtgatctcggtgagctgcctgtggacgcaagatttcctcctagagtgccaaaatcttttccattcaacacctcagtcgtgtacaaaaagactctgtttgtagaattcacggatcaccttttcaacatcgctaagccaaggccaccctggatgggtctgctaggtcctaccatccaggctgaggtttatgatacagtggtcattacacttaagaacatggcttcccatcctgtcagtcttcatgctgttggtgtatcctactggaaagcttctgagggagctgaatatgatgatcagaccagtcaaagggagaaagaagatgataaagtcttccctggtggaagccatacatatgtctggcaggtcctgaaagagaatggtccaatggcctctgacccactgtgccttacctactcatatctttctcatgtggacctggtaaaagacttgaattcaggcctcattggagccctactagtatgtagagaagggagtctggccaaggaaaagacacagaccttgcacaaatttatactactttttgctgtatttgatgaagggaaaagttggcactcagaaacaaagaactccttgatgcaggatagggatgctgcatctgctcgggcctggcctaaaatgcacacagtcaatggttatgtaaacaggtctctgccaggtctgattggatgccacaggaaatcagtctattggcatgtgattggaatgggcaccactcctgaagtgcactcaatattcctcgaaggtcacacatttcttgtgaggaaccatcgccaggctagcttggaaatctcgccaataactttccttactgctcaaacactcttgatggaccttggacagtttctactgttttgtcatatctcttcccaccaacatgatggcatggaagcttatgtcaaagtagacagctgtccagaggaaccccaactacgaatgaaaaataatgaagaagcggaagactatgatgatgatcttactgattctgaaatggatgtggtcaggtttgatgatgacaactctccttcctttatccaaattcgctcagttgccaagaagcatcctaaaacttgggtacattacattgctgctgaagaggaggactgggactatgctcccttagtcctcgcccccgatgacagaagttataaaagtcaatatttgaacaatggccctcagcggattggtaggaagtacaaaaaagtccgatttatggcatacacagatgaaacctttaagactcgtgaagctattcagcatgaatcaggaatcttgggacctttactttatggggaagttggagacacactgttgattatatttaagaatcaagcaagcagaccatataacatctaccctcacggaatcactgatgtccgtcctttgtattcaaggagattaccaaaaggtgtaaaacatttgaaggattttccaattctgccaggagaaatattcaaatataaatggacagtgactgtagaagatgggccaactaaatcagatcctcggtgcctgacccgctattactctagtttcgttaatatggagagagatctagcttcaggactcattggccctctcctcatctgctacaaagaatctgtagatcaaagaggaaaccagataatgtcagacaagaggaatgtcatcctgttttctgtatttgatgagaaccgaagctggtacctcacagagaatatacaacgctttctccccaatccagctggagtgcagcttgaggatccagagttccaagcctccaacatcatgcacagcatcaatggctatgtttttgatagtttgcagttgtcagtttgtttgcatgaggtggcatactggtacattctaagcattggagcacagactgacttcctttctgtcttcttctctggatataccttcaaacacaaaatggtctatgaagacacactcaccctattcccattctcaggagaaactgtcttcatgtcgatggaaaacccaggtctatggattctggggtgccacaactcagactttcggaacagaggcatgaccgccttactgaaggtttctagttgtgacaagaacactggtgattattacgaggacagttatgaagatatttcagcatacttgctgagtaaaaacaatgccattgaaccaagaagcttctctcaaaacggcgcgccaagtcccgctggaagcccaactagcaccgaagaggggacctcagagtccgccacccccgagtccggccctggctctgagcctgccactagcggctccgagactcctggcacatccgaaagcgctacacccgagagtggacccggcacctctaccgagcccagtgagggctccgcccctggaacaagcaccgagcccagcgaaggcagcgccccagggacctccacagagcccagtgaaggcagtgctcctggcaccagcaccgaaccaagcgagggctctgcacccgggacctccaccgagccaagcgaaggctctgcccctggcacttccaccgagcccagcgaaggcagcgcccctgggagccccgctggctctcccaccagcactgaggagggcacatctaccgaaccaagtgaaggctctgcaccaggtgcctcgagcccaccagtcttgaaacgccatcaagctgaaataactcgtactactcttcagtcagatcaagaggaaatcgattatgatgataccatatcagttgaaatgaagaaggaagattttgacatttatgatgaggatgaaaatcagagcccccgcagctttcaaaagaaaacacgacactattttattgctgcagtggagaggctctgggattatgggatgagtagctccccacatgttctaagaaacagggctcagagtggcagtgtccctcagttcaagaaagttgttttccaggaatttactgatggctcctttactcagcccttataccgtggagaactaaatgaacatttgggactcctggggccatatataagagcagaagttgaagataatatcatggtaactttcagaaatcaggcctctcgtccctattccttctattctagccttatttcttatgaggaagatcagaggcaaggagcagaacctagaaaaaactttgtcaagcctaatgaaaccaaaacttacttttggaaagtgcaacatcatatggcacccactaaagatgagtttgactgcaaagcctgggcttatttctctgatgttgacctggaaaaagatgtgcactcaggcctgattggaccccttctggtctgccacactaacacactgaaccctgctcatgggagacaagtgacagtacaggaatttgctctgtttttcaccatctttgatgagaccaaaagctggtacttcactgaaaatatggaaagaaactgcaggggcgcgccaacgtccgaaagtgctacccctgagtcaggccctggtagtgagcctgccacaagcggaagcgaaactccggggacctcagagtctgccactcccgaatcggggccaggctctgaaccggccacttcagggagcgaaacaccaggaacatcggagagcgctaccccggagagcgggccaggaactagtactgagcctagcgagggaagtgcacctggtacaagcgagtccgccacacccgagtctggccctggctctccagcgggctcacccacgagcactgaagagggctctcccgctggcagcccaacgtcgacagaagaaggatcaccagcaggctcccccacatcaacagaggagggtacatcagaatctgctactcccgagagtggacccggtacctccactgagcccagcgaggggagtgcaccaggtgcctcgagcgctccctgcaatatccagatggaagatcccacttttaaagagaattatcgcttccatgcaatcaatggctacataatggatacactacctggcttagtaatggctcaggatcaaaggattcgatggtatctgctcagcatgggcagcaatgaaaacatccattctattcatttcagtggacatgtgttcactgtacgaaaaaaagaggagtataaaatggcactgtacaatctctatccaggtgtttttgagacagtggaaatgttaccatccaaagctggaatttggcgggtggaatgccttattggcgagcatctacatgctgggatgagcacactttttctggtgtacagcaataagtgtcagactcccctgggaatggcttctggacacattagagattttcagattacagcttcaggacaatatggacagtgggccccaaagctggccagacttcattattccggatcaatcaatgcctggagcaccaaggagcccttttcttggatcaaggtggatctgttggcaccaatgattattcacggcatcaagacccagggtgcccgtcagaagttctccagcctctacatctctcagtttatcatcatgtatagtcttgatgggaagaagtggcagacttatcgaggaaattccactggaaccttaatggtcttctttggcaatgtggattcatctgggataaaacacaatatttttaaccctccaattattgctcgatacatccgtttgcacccaactcattatagcattcgcagcactcttcgcatggagttgatgggctgtgatttaggcgcgccaggttctcctgctggctcccccacctcaacagaagaggggacaagcgaaagcgctacgcctgagagtggccctggctctgagccagccacctccggctctgaaacccctgcctcgagcaatagttgcagcatgccattgggaatggagagtaaagcaatatcagatgcacagattactgcttcatcctactttaccaatatgtttgccacctggtctccttcaaaagctcgacttcacctccaagggaggagtaatgcctggagacctcaggtgaataatccaaaagagtggctgcaagtggacttccagaagacaatgaaagtcacaggagtaactactcagggagtaaaatctctgcttaccagcatgtatgtgaaggagttcctcatctccagcagtcaagatggccatcagtggactctcttttttcagaatggcaaagtaaaggtttttcagggaaatcaagactccttcacacctgtggtgaactctctagacccaccgttactgactcgctaccttcgaattcacccccagagttgggtgcaccagattgccctgaggatggaggttctgggctgcgaggcacaggacctctacggcgcgccaggtacctcagagtctgctacccccgagtcagggccaggatcagagccagccacctccgggtctgagacacccgggacttccgagagtgccacccctgagtccggacccgggtccgagcccgccacttccggctccgaaactcccggcacaagcgagagcgctaccccagagtcaggaccaggaacatctacagagccctctgaaggctccgctccagggtccccagccggcagtcccactagcaccgaggagggaacctctgaaagcgccacacccgaatcagggccagggtctgagcctgctaccagcggcagcgagacaccaggcacctctgagtccgccacaccagagtccggacccggatctcccgctgggagccccacctccactgaggagggatctcctgctggctctccaacatctactgaggaaggtacctcaaccgagccatccgagggatcagctcccggcacctcagagtcggcaaccccggagtctggacccggaacttccgaaagtgccacaccagagtccggtcccgggacttcagaatcagcaacacccgagtccggccctgggtctgaacccgccacaagtggtagtgagacaccaggatcagaacctgctacctcagggtcagagacacccggatctccggcaggctcaccaacctccactgaggagggcaccagcacagaaccaagcgagggctccgcacccggaacaagcactgaacccagtgagggttcagcacccggctctgagccggccacaagtggcagtgagacacccggcacttcagagagtgccacccccgagagtggcccaggcactagtaccgagccctctgaaggcagtgcgccagcctcgagcgaacaaaaactcatctcagaagaggatctgtcacctgcaaccggtcatcatcaccatcaccattga

SEQ ID NO: 1367 - protein, 2095 aa, synthetic construct
  REGION 1..2095: note = Description of Artificial Sequence: Synthetic polypeptide
ATRRYYLGAVELSWDYMQSDLGELPVDARFPPRVPKSFPFNTSVVYKKTLFVEFTDHLFNIAKPRPPWMGLLGPTIQAEVYDTVVITLKNMASHPVSLHAVGVSYWKASEGAEYDDQTSQREKEDDKVFPGGSHTYVWQVLKENGPMASDPLCLTYSYLSHVDLVKDLNSGLIGALLVCREGSLAKEKTQTLHKFILLFAVFDEGKSWHSETKNSLMQDRDAASARAWPKMHTVNGYVNRSLPGLIGCHRKSVYWHVIGMGTTPEVHSIFLEGHTFLVRNHRQASLEISPITFLTAQTLLMDLGQFLLFCHISSHQHDGMEAYVKVDSCPEEPQLRMKNNEEAEDYDDDLTDSEMDVVRFDDDNSPSFIQIRSVAKKHPKTWVHYIAAEEEDWDYAPLVLAPDDRSYKSQYLNNGPQRIGRKYKKVRFMAYTDETFKTREAIQHESGILGPLLYGEVGDTLLIIFKNQASRPYNIYPHGITDVRPLYSRRLPKGVKHLKDFPILPGEIFKYKWTVTVEDGPTKSDPRCLTRYYSSFVNMERDLASGLIGPLLICYKESVDQRGNQIMSDKRNVILFSVFDENRSWYLTENIQRFLPNPAGVQLEDPEFQASNIMHSINGYVFDSLQLSVCLHEVAYWYILSIGAQTDFLSVFFSGYTFKHKMVYEDTLTLFPFSGETVFMSMENPGLWILGCHNSDFRNRGMTALLKVSSCDKNTGDYYEDSYEDISAYLLSKNNAIEPRSFSQNGAPSPAGSPTSTEEGTSESATPESGPGSEPATSGSETPGTSESATPESGPGTSTEPSEGSAPGTSTEPSEGSAPGTSTEPSEGSAPGTSTEPSEGSAPGTSTEPSEGSAPGTSTEPSEGSAPGSPAGSPTSTEEGTSTEPSEGSAPGASSPPVLKRHQAEITRTTLQSDQEEIDYDDTISVEMKKEDFDIYDEDENQSPRSFQKKTRHYFIAAVERLWDYGMSSSPHVLRNRAQSGSVPQFKKVVFQEFTDGSFTQPLYRGELNEHLGLLGPYIRAEVEDNIMVTFRNQASRPYSFYSSLISYEEDQRQGAEPRKNFVKPNETKTYFWKVQHHMAPTKDEFDCKAWAYFSDVDLEKDVHSGLIGPLLVCHTNTLNPAHGRQVTVQEFALFFTIFDETKSWYFTENMERNCRGAPTSESATPESGPGSEPATSGSETPGTSESATPESGPGSEPATSGSETPGTSESATPESGPGTSTEPSEGSAPGTSESATPESGPGSPAGSPTSTEEGSPAGSPTSTEEGSPAGSPTSTEEGTSESATPESGPGTSTEPSEGSAPGASSAPCNIQMEDPTFKENYRFHAINGYIMDTLPGLVMAQDQRIRWYLLSMGSNENIHSIHFSGHVFTVRKKEEYKMALYNLYPGVFETVEMLPSKAGIWRVECLIGEHLHAGMSTLFLVYSNKCQTPLGMASGHIRDFQITASGQYGQWAPKLARLHYSGSINAWSTKEPFSWIKVDLLAPMIIHGIKTQGARQKFSSLYISQFIIMYSLDGKKWQTYRGNSTGTLMVFFGNVDSSGIKHNIFNPPIIARYIRLHPTHYSIRSTLRMELMGCDLNSCSMPLGMESKAISDAQITASSYFTNMFATWSPSKARLHLQGRSNAWRPQVNNPKGAPGSPAGSPTSTEEGTSESATPESGPGSEPATSGSETPASSEWLQVDFQKTMKVTGVTTQGVKSLLTSMYVKEFLISSSQDGHQWTLFFQNGKVKVFQGNQDSFTPVVNSLDPPLLTRYLRIHPQSWVHQIALRMEVLGCEAQDLYGAPGTSESATPESGPGSEPATSGSETPGTSESATPESGPGSEPATSGSETPGTSESATPESGPGTSTEPSEGSAPGSPAGSPTSTEEGTSESATPESGPGSEPATSGSETPGTSESATPESGPGSPAGSPTSTEEGSPAGSPTSTEEGTSTEPSEGSAPGTSESATPESGPGTSESATPESGPGTSESATPESGPGSEPATSGSETPGSEPATSGSETPGSPAGSPTSTEEGTSTEPSEGSAPGTSTEPSEGSAPGSEPATSGSETPGTSESATPESGPGTSTEPSEGSAPASSEQKLISEEDLSPATGHHHHHH

SEQ ID NO: 1368 - DNA, 6288 bp, synthetic construct
  misc_feature 1..6288: note = Description of Artificial Sequence: Synthetic polynucleotide
  source 1..6288: mol_type = other DNA
gccaccagaagatactacctgggtgcagtggaactgtcatgggactatatgcaaagtgatctcggtgagctgcctgtggacgcaagatttcctcctagagtgccaaaatcttttccattcaacacctcagtcgtgtacaaaaagactctgtttgtagaattcacggatcaccttttcaacatcgctaagccaaggccaccctggatgggtctgctaggtcctaccatccaggctgaggtttatgatacagtggtcattacacttaagaacatggcttcccatcctgtcagtcttcatgctgttggtgtatcctactggaaagcttctgagggagctgaatatgatgatcagaccagtcaaagggagaaagaagatgataaagtcttccctggtggaagccatacatatgtctggcaggtcctgaaagagaatggtccaatggcctctgacccactgtgccttacctactcatatctttctcatgtggacctggtaaaagacttgaattcaggcctcattggagccctactagtatgtagagaagggagtctggccaaggaaaagacacagaccttgcacaaatttatactactttttgctgtatttgatgaagggaaaagttggcactcagaaacaaagaactccttgatgcaggatagggatgctgcatctgctcgggcctggcctaaaatgcacacagtcaatggttatgtaaacaggtctctgccaggtctgattggatgccacaggaaatcagtctattggcatgtgattggaatgggcaccactcctgaagtgcactcaatattcctcgaaggtcacacatttcttgtgaggaaccatcgccaggctagcttggaaatctcgccaataactttccttactgctcaaacactcttgatggaccttggacagtttctactgttttgtcatatctcttcccaccaacatgatggcatggaagcttatgtcaaagtagacagctgtccagaggaaccccaactacgaatgaaaaataatgaagaagcggaagactatgatgatgatcttactgattctgaaatggatgtggtcaggtttgatgatgacaactctccttcctttatccaaattcgctcagttgccaagaagcatcctaaaacttgggtacattacattgctgctgaagaggaggactgggactatgctcccttagtcctcgcccccgatgacagaagttataaaagtcaatatttgaacaatggccctcagcggattggtaggaagtacaaaaaagtccgatttatggcatacacagatgaaacctttaagactcgtgaagctattcagcatgaatcaggaatcttgggacctttactttatggggaagttggagacacactgttgattatatttaagaatcaagcaagcagaccatataacatctaccctcacggaatcactgatgtccgtcctttgtattcaaggagattaccaaaaggtgtaaaacatttgaaggattttccaattctgccaggagaaatattcaaatataaatggacagtgactgtagaagatgggccaactaaatcagatcctcggtgcctgacccgctattactctagtttcgttaatatggagagagatctagcttcaggactcattggccctctcctcatctgctacaaagaatctgtagatcaaagaggaaaccagataatgtcagacaagaggaatgtcatcctgttttctgtatttgatgagaaccgaagctggtacctcacagagaatatacaacgctttctccccaatccagctggagtgcagcttgaggatccagagttccaagcctccaacatcatgcacagcatcaatggctatgtttttgatagtttgcagttgtcagtttgtttgcatgaggtggcatactggtacattctaagcattggagcacagactgacttcctttctgtcttcttctctggatataccttcaaacacaaaatggtctatgaagacacactcaccctattcccattctcaggagaaactgtcttcatgtcgatggaaaacccaggtctatggattctggggtgccacaactcagactttcggaacagaggcatgaccgccttactgaaggtttctagttgtgacaagaacactggtgattattacgaggacagttatgaagatatttcagcatacttgctgagtaaaaacaatgccattgaaccaagaagcttctctcaaaacggcgcgccaagtcccgctggaagcccaactagcaccgaagaggggacctcagagtccgccacccccgagtccggccctggctctgagcctgccactagcggctccgagactcctggcacatccgaaagcgctacacccgagagtggacccggcacctctaccgagcccagtgagggctccgcccctggaacaagcaccgagcccagcgaaggcagcgccccagggacctccacagagcccagtgaaggcagtgctcctggcaccagcaccgaaccaagcgagggctctgcacccgggacctccaccgagccaagcgaaggctctgcccctggcacttccaccgagcccagcgaaggcagcgcccctgggagccccgctggctctcccaccagcactgaggagggcacatctaccgaaccaagtgaaggctctgcaccaggtgcctcgagcccaccagtcttgaaacgccatcaagctgaaataactcgtactactcttcagtcagatcaagaggaaatcgattatgatgataccatatcagttgaaatgaagaaggaagattttgacatttatgatgaggatgaaaatcagagcccccgcagctttcaaaagaaaacacgacactattttattgctgcagtggagaggctctgggattatgggatgagtagctccccacatgttctaagaaacagggctcagagtggcagtgtccctcagttcaagaaagttgttttccaggaatttactgatggctcctttactcagcccttataccgtggagaactaaatgaacatttgggactcctggggccatatataagagcagaagttgaagataatatcatggtaactttcagaaatcaggcctctcgtccctattccttctattctagccttatttcttatgaggaagatcagaggcaaggagcagaacctagaaaaaactttgtcaagcctaatgaaaccaaaacttacttttggaaagtgcaacatcatatggcacccactaaagatgagtttgactgcaaagcctgggcttatttctctgatgttgacctggaaaaagatgtgcactcaggcctgattggaccccttctggtctgccacactaacacactgaaccctgctcatgggagacaagtgacagtacaggaatttgctctgtttttcaccatctttgatgagaccaaaagctggtacttcactgaaaatatggaaagaaactgcaggggcgcgccaacgtccgaaagtgctacccctgagtcaggccctggtagtgagcctgccacaagcggaagcgaaactccggggacctcagagtctgccactcccgaatcggggccaggctctgaaccggccacttcagggagcgaaacaccaggaacatcggagagcgctaccccggagagcgggccaggaactagtactgagcctagcgagggaagtgcacctggtacaagcgagtccgccacacccgagtctggccctggctctccagcgggctcacccacgagcactgaagagggctctcccgctggcagcccaacgtcgacagaagaaggatcaccagcaggctcccccacatcaacagaggagggtacatcagaatctgctactcccgagagtggacccggtacctccactgagcccagcgaggggagtgcaccaggtgcctcgagcgctccctgcaatatccagatggaagatcccacttttaaagagaattatcgcttccatgcaatcaatggctacataatggatacactacctggcttagtaatggctcaggatcaaaggattcgatggtatctgctcagcatgggcagcaatgaaaacatccattctattcatttcagtggacatgtgttcactgtacgaaaaaaagaggagtataaaatggcactgtacaatctctatccaggtgtttttgagacagtggaaatgttaccatccaaagctggaatttggcgggtggaatgccttattggcgagcatctacatgctgggatgagcacactttttctggtgtacagcaataagtgtcagactcccctgggaatggcttctggacacattagagattttcagattacagcttcaggacaatatggacagtgggccccaaagctggccagacttcattattccggatcaatcaatgcctggagcaccaaggagcccttttcttggatcaaggtggatctgttggcaccaatgattattcacggcatcaagacccagggtgcccgtcagaagttctccagcctctacatctctcagtttatcatcatgtatagtcttgatgggaagaagtggcagacttatcgaggaaattccactggaaccttaatggtcttctttggcaatgtggattcatctgggataaaacacaatatttttaaccctccaattattgctcgatacatccgtttgcacccaactcattatagcattcgcagcactcttcgcatggagttgatgggctgtgatttaaatagttgcagcatgccattgggaatggagagtaaagcaatatcagatgcacagattactgcttcatcctactttaccaatatgtttgccacctggtctccttcaaaagctcgacttcacctccaagggaggagtaatgcctggagacctcaggtgaataatccaaaaggcgcgccaggttctcctgctggctcccccacctcaacagaagaggggacaagcgaaagcgctacgcctgagagtggccctggctctgagccagccacctccggctctgaaacccctgcctcgagcgagtggctgcaagtggacttccagaagacaatgaaagtcacaggagtaactactcagggagtaaaatctctgcttaccagcatgtatgtgaaggagttcctcatctccagcagtcaagatggccatcagtggactctcttttttcagaatggcaaagtaaaggtttttcagggaaatcaagactccttcacacctgtggtgaactctctagacccaccgttactgactcgctaccttcgaattcacccccagagttgggtgcaccagattgccctgaggatggaggttctgggctgcgaggcacaggacctctacggcgcgccaggtacctcagagtctgctacccccgagtcagggccaggatcagagccagccacctccgggtctgagacacccgggacttccgagagtgccacccctgagtccggacccgggtccgagcccgccacttccggctccgaaactcccggcacaagcgagagcgctaccccagagtcaggaccaggaacatctacagagccctctgaaggctccgctccagggtccccagccggcagtcccactagcaccgaggagggaacctctgaaagcgccacacccgaatcagggccagggtctgagcctgctaccagcggcagcgagacaccaggcacctctgagtccgccacaccagagtccggacccggatctcccgctgggagccccacctccactgaggagggatctcctgctggctctccaacatctactgaggaaggtacctcaaccgagccatccgagggatcagctcccggcacctcagagtcggcaaccccggagtctggacccggaacttccgaaagtgccacaccagagtccggtcccgggacttcagaatcagcaacacccgagtccggccctgggtctgaacccgccacaagtggtagtgagacaccaggatcagaacctgctacctcagggtcagagacacccggatctccggcaggctcaccaacctccactgaggagggcaccagcacagaaccaagcgagggctccgcacccggaacaagcactgaacccagtgagggttcagcacccggctctgagccggccacaagtggcagtgagacacccggcacttcagagagtgccacccccgagagtggcccaggcactagtaccgagccctctgaaggcagtgcgccagcctcgagcgaacaaaaactcatctcagaagaggatctgtcacctgcaaccggtcatcatcaccatcaccattga

SEQ ID NO: 1369 - protein, 2095 aa, synthetic construct
  REGION 1..2095: note = Description of Artificial Sequence: Synthetic polypeptide
ATRRYYLGAVELSWDYMQSDLGELPVDARFPPRVPKSFPFNTSVVYKKTLFVEFTDHLFNIAKPRPPWMGLLGPTIQAEVYDTVVITLKNMASHPVSLHAVGVSYWKASEGAEYDDQTSQREKEDDKVFPGGSHTYVWQVLKENGPMASDPLCLTYSYLSHVDLVKDLNSGLIGALLVCREGSLAKEKTQTLHKFILLFAVFDEGKSWHSETKNSLMQDRDAASARAWPKMHTVNGYVNRSLPGLIGCHRKSVYWHVIGMGTTPEVHSIFLEGHTFLVRNHRQASLEISPITFLTAQTLLMDLGQFLLFCHISSHQHDGMEAYVKVDSCPEEPQLRMKNNEEAEDYDDDLTDSEMDVVRFDDDNSPSFIQIRSVAKKHPKTWVHYIAAEEEDWDYAPLVLAPDDRSYKSQYLNNGPQRIGRKYKKVRFMAYTDETFKTREAIQHESGILGPLLYGEVGDTLLIIFKNQASRPYNIYPHGITDVRPLYSRRLPKGVKHLKDFPILPGEIFKYKWTVTVEDGPTKSDPRCLTRYYSSFVNMERDLASGLIGPLLICYKESVDQRGNQIMSDKRNVILFSVFDENRSWYLTENIQRFLPNPAGVQLEDPEFQASNIMHSINGYVFDSLQLSVCLHEVAYWYILSIGAQTDFLSVFFSGYTFKHKMVYEDTLTLFPFSGETVFMSMENPGLWILGCHNSDFRNRGMTALLKVSSCDKNTGDYYEDSYEDISAYLLSKNNAIEPRSFSQNGAPSPAGSPTSTEEGTSESATPESGPGSEPATSGSETPGTSESATPESGPGTSTEPSEGSAPGTSTEPSEGSAPGTSTEPSEGSAPGTSTEPSEGSAPGTSTEPSEGSAPGTSTEPSEGSAPGSPAGSPTSTEEGTSTEPSEGSAPGASSPPVLKRHQAEITRTTLQSDQEEIDYDDTISVEMKKEDFDIYDEDENQSPRSFQKKTRHYFIAAVERLWDYGMSSSPHVLRNRAQSGSVPQFKKVVFQEFTDGSFTQPLYRGELNEHLGLLGPYIRAEVEDNIMVTFRNQASRPYSFYSSLISYEEDQRQGAEPRKNFVKPNETKTYFWKVQHHMAPTKDEFDCKAWAYFSDVDLEKDVHSGLIGPLLVCHTNTLNPAHGRQVTVQEFALFFTIFDETKSWYFTENMERNCRGAPTSESATPESGPGSEPATSGSETPGTSESATPESGPGSEPATSGSETPGTSESATPESGPGTSTEPSEGSAPGTSESATPESGPGSPAGSPTSTEEGSPAGSPTSTEEGSPAGSPTSTEEGTSESATPESGPGTSTEPSEGSAPGASSAPCNIQMEDPTFKENYRFHAINGYIMDTLPGLVMAQDQRIRWYLLSMGSNENIHSIHFSGHVFTVRKKEEYKMALYNLYPGVFETVEMLPSKAGIWRVECLIGEHLHAGMSTLFLVYSNKCQTPLGMASGHIRDFQITASGQYGQWAPKLARLHYSGSINAWSTKEPFSWIKVDLLAPMIIHGIKTQGARQKFSSLYISQFIIMYSLDGKKWQTYRGNSTGTLMVFFGNVDSSGIKHNIFNPPIIARYIRLHPTHYSIRSTLRMELMGCDLNSCSMPLGMESKAISDAQITASSYFTNMFATWSPSKARLHLQGRSNAWRPQVNNPKEWLQVDFQKTMKVTGVTTQGVKSLLTSMYVKEFLISSSQDGHQWTLFFQNGAPGSPAGSPTSTEEGTSESATPESGPGSEPATSGSETPASSGKVKVFQGNQDSFTPVVNSLDPPLLTRYLRIHPQSWVHQIALRMEVLGCEAQDLYGAPGTSESATPESGPGSEPATSGSETPGTSESATPESGPGSEPATSGSETPGTSESATPESGPGTSTEPSEGSAPGSPAGSPTSTEEGTSESATPESGPGSEPATSGSETPGTSESATPESGPGSPAGSPTSTEEGSPAGSPTSTEEGTSTEPSEGSAPGTSESATPESGPGTSESATPESGPGTSESATPESGPGSEPATSGSETPGSEPATSGSETPGSPAGSPTSTEEGTSTEPSEGSAPGTSTEPSEGSAPGSEPATSGSETPGTSESATPESGPGTSTEPSEGSAPASSEQKLISEEDLSPATGHHHHHH

SEQ ID NO: 1370 - DNA, 6288 bp, synthetic construct
  misc_feature 1..6288: note = Description of Artificial Sequence: Synthetic polynucleotide
  source 1..6288: mol_type = other DNA
gccaccagaagatactacctgggtgcagtggaactgtcatgggactatatgcaaagtgatctcggtgagctgcctgtggacgcaagatttcctcctagagtgccaaaatcttttccattcaacacctcagtcgtgtacaaaaagactctgtttgtagaattcacggatcaccttttcaacatcgctaagccaaggccaccctggatgggtctgctaggtcctaccatccaggctgaggtttatgatacagtggtcattacacttaagaacatggcttcccatcctgtcagtcttcatgctgttggtgtatcctactggaaagcttctgagggagctgaatatgatgatcagaccagtcaaagggagaaagaagatgataaagtcttccctggtggaagccatacatatgtctggcaggtcctgaaagagaatggtccaatggcctctgacccactgtgccttacctactcatatctttctcatgtggacctggtaaaagacttgaattcaggcctcattggagccctactagtatgtagagaagggagtctggccaaggaaaagacacagaccttgcacaaatttatactactttttgctgtatttgatgaagggaaaagttggcactcagaaacaaagaactccttgatgcaggatagggatgctgcatctgctcgggcctggcctaaaatgcacacagtcaatggttatgtaaacaggtctctgccaggtctgattggatgccacaggaaatcagtctattggcatgtgattggaatgggcaccactcctgaagtgcactcaatattcctcgaaggtcacacatttcttgtgaggaaccatcgccaggctagcttggaaatctcgccaataactttccttactgctcaaacactcttgatggaccttggacagtttctactgttttgtcatatctcttcccaccaacatgatggcatggaagcttatgtcaaagtagacagctgtccagaggaaccccaactacgaatgaaaaataatgaagaagcggaagactatgatgatgatcttactgattctgaaatggatgtggtcaggtttgatgatgacaactctccttcctttatccaaattcgctcagttgccaagaagcatcctaaaacttgggtacattacattgctgctgaagaggaggactgggactatgctcccttagtcctcgcccccgatgacagaagttataaaagtcaatatttgaacaatggccctcagcggattggtaggaagtacaaaaaagtccgatttatggcatacacagatgaaacctttaagactcgtgaagctattcagcatgaatcaggaatcttgggacctttactttatggggaagttggagacacactgttgattatatttaagaatcaagcaagcagaccatataacatctaccctcacggaatcactgatgtccgtcctttgtattcaaggagattaccaaaaggtgtaaaacatttgaaggattttccaattctgccaggagaaatattcaaatataaatggacagtgactgtagaagatgggccaactaaatcagatcctcggtgcctgacccgctattactctagtttcgttaatatggagagagatctagcttcaggactcattggccctctcctcatctgctacaaagaatctgtagatcaaagaggaaaccagataatgtcagacaagaggaatgtcatcctgttttctgtatttgatgagaaccgaagctggtacctcacagagaatatacaacgctttctccccaatccagctggagtgcagcttgaggatccagagttccaagcctccaacatcatgcacagcatcaatggctatgtttttgatagtttgcagttgtcagtttgtttgcatgaggtggcatactggtacattctaagcattggagcacagactgacttcctttctgtcttcttctctggatataccttcaaacacaaaatggtctatgaagacacactcaccctattcccattctcaggagaaactgtcttcatgtcgatggaaaacccaggtctatggattctggggtgccacaactcagactttcggaacagaggcatgaccgccttactgaaggtttctagttgtgacaagaacactggtgattattacgaggacagttatgaagatatttcagcatacttgctgagtaaaaacaatgccattgaaccaagaagcttctctcaaaacggcgcgccaagtcccgctggaagcccaactagcaccgaagaggggacctcagagtccgccacccccgagtccggccctggctctgagcctgccactagcggctccgagactcctggcacatccgaaagcgctacacccgagagtggacccggcacctctaccgagcccagtgagggctccgcccctggaacaagcaccgagcccagcgaaggcagcgccccagggacctccacagagcccagtgaaggcagtgctcctggcaccagcaccgaaccaagcgagggctctgcacccgggacctccaccgagccaagcgaaggctctgcccctggcacttccaccgagcccagcgaaggcagcgcccctgggagccccgctggctctcccaccagcactgaggagggcacatctaccgaaccaagtgaaggctctgcaccaggtgcctcgagcccaccagtcttgaaacgccatcaagctgaaataactcgtactactcttcagtcagatcaagaggaaatcgattatgatgataccatatcagttgaaatgaagaaggaagattttgacatttatgatgaggatgaaaatcagagcccccgcagctttcaaaagaaaacacgacactattttattgctgcagtggagaggctctgggattatgggatgagtagctccccacatgttctaagaaacagggctcagagtggcagtgtccctcagttcaagaaagttgttttccaggaatttactgatggctcctttactcagcccttataccgtggagaactaaatgaacatttgggactcctggggccatatataagagcagaagttgaagataatatcatggtaactttcagaaatcaggcctctcgtccctattccttctattctagccttatttcttatgaggaagatcagaggcaaggagcagaacctagaaaaaactttgtcaagcctaatgaaaccaaaacttacttttggaaagtgcaacatcatatggcacccactaaagatgagtttgactgcaaagcctgggcttatttctctgatgttgacctggaaaaagatgtgcactcaggcctgattggaccccttctggtctgccacactaacacactgaaccctgctcatgggagacaagtgacagtacaggaatttgctctgtttttcaccatctttgatgagaccaaaagctggtacttcactgaaaatatggaaagaaactgcaggggcgcgccaacgtccgaaagtgctacccctgagtcaggccctggtagtgagcctgccacaagcggaagcgaaactccggggacctcagagtctgccactcccgaatcggggccaggctctgaaccggccacttcagggagcgaaacaccaggaacatcggagagcgctaccccggagagcgggccaggaactagtactgagcctagcgagggaagtgcacctggtacaagcgagtccgccacacccgagtctggccctggctctccagcgggctcacccacgagcactgaagagggctctcccgctggcagcccaacgtcgacagaagaaggatcaccagcaggctcccccacatcaacagaggagggtacatcagaatctgctactcccgagagtggacccggtacctccactgagcccagcgaggggagtgcaccaggtgcctcgagcgctccctgcaatatccagatggaagatcccacttttaaagagaattatcgcttccatgcaatcaatggctacataatggatacactacctggcttagtaatggctcaggatcaaaggattcgatggtatctgctcagcatgggcagcaatgaaaacatccattctattcatttcagtggacatgtgttcactgtacgaaaaaaagaggagtataaaatggcactgtacaatctctatccaggtgtttttgagacagtggaaatgttaccatccaaagctggaatttggcgggtggaatgccttattggcgagcatctacatgctgggatgagcacactttttctggtgtacagcaataagtgtcagactcccctgggaatggcttctggacacattagagattttcagattacagcttcaggacaatatggacagtgggccccaaagctggccagacttcattattccggatcaatcaatgcctggagcaccaaggagcccttttcttggatcaaggtggatctgttggcaccaatgattattcacggcatcaagacccagggtgcccgtcagaagttctccagcctctacatctctcagtttatcatcatgtatagtcttgatgggaagaagtggcagacttatcgaggaaattccactggaaccttaatggtcttctttggcaatgtggattcatctgggataaaacacaatatttttaaccctccaattattgctcgatacatccgtttgcacccaactcattatagcattcgcagcactcttcgcatggagttgatgggctgtgatttaaatagttgcagcatgccattgggaatggagagtaaagcaatatcagatgcacagattactgcttcatcctactttaccaatatgtttgccacctggtctccttcaaaagctcgacttcacctccaagggaggagtaatgcctggagacctcaggtgaataatccaaaagagtggctgcaagtggacttccagaagacaatgaaagtcacaggagtaactactcagggagtaaaatctctgcttaccagcatgtatgtgaaggagttcctcatctccagcagtcaagatggccatcagtggactctcttttttcagaatggcgcgccaggttctcctgctggctcccccacctcaacagaagaggggacaagcgaaagcgctacgcctgagagtggccctggctctgagccagccacctccggctctgaaacccctgcctcgagcggcaaagtaaaggtttttcagggaaatcaagactccttcacacctgtggtgaactctctagacccaccgttactgactcgctaccttcgaattcacccccagagttgggtgcaccagattgccctgaggatggaggttctgggctgcgaggcacaggacctctacggcgcgccaggtacctcagagtctgctacccccgagtcagggccaggatcagagccagccacctccgggtctgagacacccgggacttccgagagtgccacccctgagtccggacccgggtccgagcccgccacttccggctccgaaactcccggcacaagcgagagcgctaccccagagtcaggaccaggaacatctacagagccctctgaaggctccgctccagggtccccagccggcagtcccactagcaccgaggagggaacctctgaaagcgccacacccgaatcagggccagggtctgagcctgctaccagcggcagcgagacaccaggcacctctgagtccgccacaccagagtccggacccggatctcccgctgggagccccacctccactgaggagggatctcctgctggctctccaacatctactgaggaaggtacctcaaccgagccatccgagggatcagctcccggcacctcagagtcggcaaccccggagtctggacccggaacttccgaaagtgccacaccagagtccggtcccgggacttcagaatcagcaacacccgagtccggccctgggtctgaacccgccacaagtggtagtgagacaccaggatcagaacctgctacctcagggtcagagacacccggatctccggcaggctcaccaacctccactgaggagggcaccagcacagaaccaagcgagggctccgcacccggaacaagcactgaacccagtgagggttcagcacccggctctgagccggccacaagtggcagtgagacacccggcacttcagagagtgccacccccgagagtggcccaggcactagtaccgagccctctgaaggcagtgcgccagcctcgagcgaacaaaaactcatctcagaagaggatctgtcacctgcaaccggtcatcatcaccatcaccattga

SEQ ID NO: 1371 - protein, 1945 aa, synthetic construct
  REGION 1..1945: note = Description of Artificial Sequence: Synthetic polypeptide
ATRRYYLGAVELSWDYMQGAPGSPAGSPTSTEEGTSESATPESGPGSEPATSGSETPASSSDLGELPVDARFPPRVPKSFPFNTSVVYKKTLFVEFTDHLFNIAKPRPPWMGLLGPTIQAEVYDTVVITLKNMASHPVSLHAVGVSYWKASEGAEYDDQTSQREKEDDKVFPGGSHTYVWQVLKENGPMASDPLCLTYSYLSHVDLVKDLNSGLIGALLVCREGSLAKEKTQTLHKFILLFAVFDEGKSWHSETKNSLMQDRDAASARAWPKMHTVNGYVNRSLPGLIGCHRKSVYWHVIGMGTTPEVHSIFLEGHTFLVRNHRQASLEISPITFLTAQTLLMDLGQFLLFCHISSHQHDGMEAYVKVDSCPEEPQLRMKNNEEAEDYDDDLTDSEMDVVRFDDDNSPSFIQIRSVAKKHPKTWVHYIAAEEEDWDYAPLVLAPDDRSYKSQYLNNGPQRIGRKYKKVRFMAYTDETFKTREAIQHESGILGPLLYGEVGDTLLIIFKNQASRPYNIYPHGITDVRPLYSRRLPKGVKHLKDFPILPGEIFKYKWTVTVEDGPTKSDPRCLTRYYSSFVNMERDLASGLIGPLLICYKESVDQRGNQIMSDKRNVILFSVFDENRSWYLTENIQRFLPNPAGVQLEDPEFQASNIMHSINGYVFDSLQLSVCLHEVAYWYILSIGAQTDFLSVFFSGYTFKHKMVYEDTLTLFPFSGETVFMSMENPGLWILGCHNSDFRNRGMTALLKVSSCDKNTGDYYEDSYEDISAYLLSKNNAIEPRSFSQNGAPSPAGSPTSTEEGTSESATPESGPGSEPATSGSETPGTSESATPESGPGTSTEPSEGSAPGTSTEPSEGSAPGTSTEPSEGSAPGTSTEPSEGSAPGTSTEPSEGSAPGTSTEPSEGSAPGSPAGSPTSTEEGTSTEPSEGSAPGASSPPVLKRHQAEITRTTLQSDQEEIDYDDTISVEMKKEDFDIYDEDENQSPRSFQKKTRHYFIAAVERLWDYGMSSSPHVLRNRAQSGSVPQFKKVVFQEFTDGSFTQPLYRGELNEHLGLLGPYIRAEVEDNIMVTFRNQASRPYSFYSSLISYEEDQRQGAEPRKNFVKPNETKTYFWKVQHHMAPTKDEFDCKAWAYFSDVDLEKDVHSGLIGPLLVCHTNTLNPAHGRQVTVQEFALFFTIFDETKSWYFTENMERNCRAPCNIQMEDPTFKENYRFHAINGYIMDTLPGLVMAQDQRIRWYLLSMGSNENIHSIHFSGHVFTVRKKEEYKMALYNLYPGVFETVEMLPSKAGIWRVECLIGEHLHAGMSTLFLVYSNKCQTPLGMASGHIRDFQITASGQYGQWAPKLARLHYSGSINAWSTKEPFSWIKVDLLAPMIIHGIKTQGARQKFSSLYISQFIIMYSLDGKKWQTYRGNSTGTLMVFFGNVDSSGIKHNIFNPPIIARYIRLHPTHYSIRSTLRMELMGCDLNSCSMPLGMESKAISDAQITASSYFTNMFATWSPSKARLHLQGRSNAWRPQVNNPKEWLQVDFQKTMKVTGVTTQGVKSLLTSMYVKEFLISSSQDGHQWTLFFQNGKVKVFQGNQDSFTPVVNSLDPPLLTRYLRIHPQSWVHQIALRMEVLGCEAQDLYGAPGTSESATPESGPGSEPATSGSETPGTSESATPESGPGSEPATSGSETPGTSESATPESGPGTSTEPSEGSAPGSPAGSPTSTEEGTSESATPESGPGSEPATSGSETPGTSESATPESGPGSPAGSPTSTEEGSPAGSPTSTEEGTSTEPSEGSAPGTSESATPESGPGTSESATPESGPGTSESATPESGPGSEPATSGSETPGSEPATSGSETPGSPAGSPTSTEEGTSTEPSEGSAPGTSTEPSEGSAPGSEPATSGSETPGTSESATPESGPGTSTEPSEGSAPASSEQKLISEEDLSPATGHHHHHH

SEQ ID NO: 1372 - DNA, 5838 bp, synthetic construct
  misc_feature 1..5838: note = Description of Artificial Sequence: Synthetic polynucleotide
  source 1..5838: mol_type = other DNA
gccaccagaagatactacctgggtgcagtggaactgtcatgggactatatgcaaggcgcgccaggttctcctgctggctcccccacctcaacagaagaggggacaagcgaaagcgctacgcctgagagtggccctggctctgagccagccacctccggctctgaaacccctgcctcgagcagtgatctcggtgagctgcctgtggacgcaagatttcctcctagagtgccaaaatcttttccattcaacacctcagtcgtgtacaaaaagactctgtttgtagaattcacggatcaccttttcaacatcgctaagccaaggccaccctggatgggtctgctaggtcctaccatccaggctgaggtttatgatacagtggtcattacacttaagaacatggcttcccatcctgtcagtcttcatgctgttggtgtatcctactggaaagcttctgagggagctgaatatgatgatcagaccagtcaaagggagaaagaagatgataaagtcttccctggtggaagccatacatatgtctggcaggtcctgaaagagaatggtccaatggcctctgacccactgtgccttacctactcatatctttctcatgtggacctggtaaaagacttgaattcaggcctcattggagccctactagtatgtagagaagggagtctggccaaggaaaagacacagaccttgcacaaatttatactactttttgctgtatttgatgaagggaaaagttggcactcagaaacaaagaactccttgatgcaggatagggatgctgcatctgctcgggcctggcctaaaatgcacacagtcaatggttatgtaaacaggtctctgccaggtctgattggatgccacaggaaatcagtctattggcatgtgattggaatgggcaccactcctgaagtgcactcaatattcctcgaaggtcacacatttcttgtgaggaaccatcgccaggctagcttggaaatctcgccaataactttccttactgctcaaacactcttgatggaccttggacagtttctactgttttgtcatatctcttcccaccaacatgatggcatggaagcttatgtcaaagtagacagctgtccagaggaaccccaactacgaatgaaaaataatgaagaagcggaagactatgatgatgatcttactgattctgaaatggatgtggtcaggtttgatgatgacaactctccttcctttatccaaattcgctcagttgccaagaagcatcctaaaacttgggtacattacattgctgctgaagaggaggactgggactatgctcccttagtcctcgcccccgatgacagaagttataaaagtcaatatttgaacaatggccctcagcggattggtaggaagtacaaaaaagtccgatttatggcatacacagatgaaacctttaagactcgtgaagctattcagcatgaatcaggaatcttgggacctttactttatggggaagttggagacacactgttgattatatttaagaatcaagcaagcagaccatataacatctaccctcacggaatcactgatgtccgtcctttgtattcaaggagattaccaaaaggtgtaaaacatttgaaggattttccaattctgccaggagaaatattcaaatataaatggacagtgactgtagaagatgggccaactaaatcagatcctcggtgcctgacccgctattactctagtttcgttaatatggagagagatctagcttcaggactcattggccctctcctcatctgctacaaagaatctgtagatcaaagaggaaaccagataatgtcagacaagaggaatgtcatcctgttttctgtatttgatgagaaccgaagctggtacctcacagagaatatacaacgctttctccccaatccagctggagtgcagcttgaggatccagagttccaagcctccaacatcatgcacagcatcaatggctatgtttttgatagtttgcagttgtcagtttgtttgcatgaggtggcatactggtacattctaagcattggagcacagactgacttcctttctgtcttcttctctggatataccttcaaacacaaaatggtctatgaagacacactcaccctattcccattctcaggagaaactgtcttcatgtcgatggaaaacccaggtctatggattctggggtgccacaactcagactttcggaacagaggcatgaccgccttactgaaggtttctagttgtgacaagaacactggtgattattacgaggacagttatgaagatatttcagcatacttgctgagtaaaaacaatgccattgaaccaagaagcttctctcaaaacggcgcgccaagtcccgctggaagcccaactagcaccgaagaggggacctcagagtccgccacccccgagtccggccctggctctgagcctgccactagcggctccgagactcctggcacatccgaaagcgctacacccgagagtggacccggcacctctaccgagcccagtgagggctccgcccctggaacaagcaccgagcccagcgaaggcagcgccccagggacctccacagagcccagtgaaggcagtgctcctggcaccagcaccgaaccaagcgagggctctgcacccgggacctccaccgagccaagcgaaggctctgcccctggcacttccaccgagcccagcgaaggcagcgcccctgggagccccgctggctctcccaccagcactgaggagggcacatctaccgaaccaagtgaaggctctgcaccaggtgcctcgagcccaccagtcttgaaacgccatcaagctgaaataactcgtactactcttcagtcagatcaagaggaaatcgattatgatgataccatatcagttgaaatgaagaaggaagattttgacatttatgatgaggatgaaaatcagagcccccgcagctttcaaaagaaaacacgacactattttattgctgcagtggagaggctctgggattatgggatgagtagctccccacatgttctaagaaacagggctcagagtggcagtgtccctcagttcaagaaagttgttttccaggaatttactgatggctcctttactcagcccttataccgtggagaactaaatgaacatttgggactcctggggccatatataagagcagaagttgaagataatatcatggtaactttcagaaatcaggcctctcgtccctattccttctattctagccttatttcttatgaggaagatcagaggcaaggagcagaacctagaaaaaactttgtcaagcctaatgaaaccaaaacttacttttggaaagtgcaacatcatatggcacccactaaagatgagtttgactgcaaagcctgggcttatttctctgatgttgacctggaaaaagatgtgcactcaggcctgattggaccccttctggtctgccacactaacacactgaaccctgctcatgggagacaagtgacagtacaggaatttgctctgtttttcaccatctttgatgagaccaaaagctggtacttcactgaaaatatggaaagaaactgcagggctccctgcaatatccagatggaagatcccacttttaaagagaattatcgcttccatgcaatcaatggctacataatggatacactacctggcttagtaatggctcaggatcaaaggattcgatggtatctgctcagcatgggcagcaatgaaaacatccattctattcatttcagtggacatgtgttcactgtacgaaaaaaagaggagtataaaatggcactgtacaatctctatccaggtgtttttgagacagtggaaatgttaccatccaaagctggaatttggcgggtggaatgccttattggcgagcatctacatgctgggatgagcacactttttctggtgtacagcaataagtgtcagactcccctgggaatggcttctggacacattagagattttcagattacagcttcaggacaatatggacagtgggccccaaagctggccagacttcattattccggatcaatcaatgcctggagcaccaaggagcccttttcttggatcaaggtggatctgttggcaccaatgattattcacggcatcaagacccagggtgcccgtcagaagttctccagcctctacatctctcagtttatcatcatgtatagtcttgatgggaagaagtggcagacttatcgaggaaattccactggaaccttaatggtcttctttggcaatgtggattcatctgggataaaacacaatatttttaaccctccaattattgctcgatacatccgtttgcacccaactcattatagcattcgcagcactcttcgcatggagttgatgggctgtgatttaaatagttgcagcatgccattgggaatggagagtaaagcaatatcagatgcacagattactgcttcatcctactttaccaatatgtttgccacctggtctccttcaaaagctcgacttcacctccaagggaggagtaatgcctggagacctcaggtgaataatccaaaagagtggctgcaagtggacttccagaagacaatgaaagtcacaggagtaactactcagggagtaaaatctctgcttaccagcatgtatgtgaaggagttcctcatctccagcagtcaagatggccatcagtggactctcttttttcagaatggcaaagtaaaggtttttcagggaaatcaagactccttcacacctgtggtgaactctctagacccaccgttactgactcgctaccttcgaattcacccccagagttgggtgcaccagattgccctgaggatggaggttctgggctgcgaggcacaggacctctacggcgcgccaggtacctcagagtctgctacccccgagtcagggccaggatcagagccagccacctccgggtctgagacacccgggacttccgagagtgccacccctgagtccggacccgggtccgagcccgccacttccggctccgaaactcccggcacaagcgagagcgctaccccagagtcaggaccaggaacatctacagagccctctgaaggctccgctccagggtccccagccggcagtcccactagcaccgaggagggaacctctgaaagcgccacacccgaatcagggccagggtctgagcctgctaccagcggcagcgagacaccaggcacctctgagtccgccacaccagagtccggacccggatctcccgctgggagccccacctccactgaggagggatctcctgctggctctccaacatctactgaggaaggtacctcaaccgagccatccgagggatcagctcccggcacctcagagtcggcaaccccggagtctggacccggaacttccgaaagtgccacaccagagtccggtcccgggacttcagaatcagcaacacccgagtccggccctgggtctgaacccgccacaagtggtagtgagacaccaggatcagaacctgctacctcagggtcagagacacccggatctccggcaggctcaccaacctccactgaggagggcaccagcacagaaccaagcgagggctccgcacccggaacaagcactgaacccagtgagggttcagcacccggctctgagccggccacaagtggcagtgagacacccggcacttcagagagtgccacccccgagagtggcccaggcactagtaccgagccctctgaaggcagtgcgccagcctcgagcgaacaaaaactcatctcagaagaggatctgtcacctgcaaccggtcatcatcaccatcaccattga

SEQ ID NO: 1373 - protein, 1945 aa, synthetic construct
  REGION 1..1945: note = Description of Artificial Sequence: Synthetic polypeptide
ATRRYYLGAVELSWDYMQSDLGELPVDARFPPRVPKSFPFNTSVVYKKTLFVEFTDHLFNIAKPRPPWMGLLGPTIQAEVYDTVVITLKNMASHPVSLHAVGVSYWKASEGAEYDDQTSQREKEDDKVFPGGSHTYVWQVLKENGPMASDPLCLTYSYLSHVDLVKDLNSGLIGALLVCREGSLAKEKTQTLHKFILLFAVFDEGKSWHSETKNSLMQDRDAASARAWPKMHTVNGYVNRSLPGLIGCHRKSVYWHVIGMGTTPEVHSIFLEGHTFLVRNHRQASLEISPITFLTAQTLLMDLGQFLLFCHISSHQHDGMEAYVKVDSCPEEPQLRMKNNEEAEDYDDDLTDSEMDVVRFDDDNSPSFIQIRSVAKKHPKTWVHYIAAEEEDWDYAPLVLAPDGAPGSPAGSPTSTEEGTSESATPESGPGSEPATSGSETPASSDRSYKSQYLNNGPQRIGRKYKKVRFMAYTDETFKTREAIQHESGILGPLLYGEVGDTLLIIFKNQASRPYNIYPHGITDVRPLYSRRLPKGVKHLKDFPILPGEIFKYKWTVTVEDGPTKSDPRCLTRYYSSFVNMERDLASGLIGPLLICYKESVDQRGNQIMSDKRNVILFSVFDENRSWYLTENIQRFLPNPAGVQLEDPEFQASNIMHSINGYVFDSLQLSVCLHEVAYWYILSIGAQTDFLSVFFSGYTFKHKMVYEDTLTLFPFSGETVFMSMENPGLWILGCHNSDFRNRGMTALLKVSSCDKNTGDYYEDSYEDISAYLLSKNNAIEPRSFSQNGAPSPAGSPTSTEEGTSESATPESGPGSEPATSGSETPGTSESATPESGPGTSTEPSEGSAPGTSTEPSEGSAPGTSTEPSEGSAPGTSTEPSEGSAPGTSTEPSEGSAPGTSTEPSEGSAPGSPAGSPTSTEEGTSTEPSEGSAPGASSPPVLKRHQAEITRTTLQSDQEEIDYDDTISVEMKKEDFDIYDEDENQSPRSFQKKTRHYFIAAVERLWDYGMSSSPHVLRNRAQSGSVPQFKKVVFQEFTDGSFTQPLYRGELNEHLGLLGPYIRAEVEDNIMVTFRNQASRPYSFYSSLISYEEDQRQGAEPRKNFVKPNETKTYFWKVQHHMAPTKDEFDCKAWAYFSDVDLEKDVHSGLIGPLLVCHTNTLNPAHGRQVTVQEFALFFTIFDETKSWYFTENMERNCRAPCNIQMEDPTFKENYRFHAINGYIMDTLPGLVMAQDQRIRWYLLSMGSNENIHSIHFSGHVFTVRKKEEYKMALYNLYPGVFETVEMLPSKAGIWRVECLIGEHLHAGMSTLFLVYSNKCQTPLGMASGHIRDFQITASGQYGQWAPKLARLHYSGSINAWSTKEPFSWIKVDLLAPMIIHGIKTQGARQKFSSLYISQFIIMYSLDGKKWQTYRGNSTGTLMVFFGNVDSSGIKHNIFNPPIIARYIRLHPTHYSIRSTLRMELMGCDLNSCSMPLGMESKAISDAQITASSYFTNMFATWSPSKARLHLQGRSNAWRPQVNNPKEWLQVDFQKTMKVTGVTTQGVKSLLTSMYVKEFLISSSQDGHQWTLFFQNGKVKVFQGNQDSFTPVVNSLDPPLLTRYLRIHPQSWVHQIALRMEVLGCEAQDLYGAPGTSESATPESGPGSEPATSGSETPGTSESATPESGPGSEPATSGSETPGTSESATPESGPGTSTEPSEGSAPGSPAGSPTSTEEGTSESATPESGPGSEPATSGSETPGTSESATPESGPGSPAGSPTSTEEGSPAGSPTSTEEGTSTEPSEGSAPGTSESATPESGPGTSESATPESGPGTSESATPESGPGSEPATSGSETPGSEPATSGSETPGSPAGSPTSTEEGTSTEPSEGSAPGTSTEPSEGSAPGSEPATSGSETPGTSESATPESGPGTSTEPSEGSAPASSEQKLISEEDLSPATGHHHHHH

SEQ ID NO: 1374 - DNA, 5838 bp, synthetic construct
  misc_feature 1..5838: note = Description of Artificial Sequence: Synthetic polynucleotide
  source 1..5838: mol_type = other DNA
gccaccagaagatactacctgggtgcagtggaactgtcatgggactatatgcaaagtgatctcggtgagctgcctgtggacgcaagatttcctcctagagtgccaaaatcttttccattcaacacctcagtcgtgtacaaaaagactctgtttgtagaattcacggatcaccttttcaacatcgctaagccaaggccaccctggatgggtctgctaggtcctaccatccaggctgaggtttatgatacagtggtcattacacttaagaacatggcttcccatcctgtcagtcttcatgctgttggtgtatcctactggaaagcttctgagggagctgaatatgatgatcagaccagtcaaagggagaaagaagatgataaagtcttccctggtggaagccatacatatgtctggcaggtcctgaaagagaatggtccaatggcctctgacccactgtgccttacctactcatatctttctcatgtggacctggtaaaagacttgaattcaggcctcattggagccctactagtatgtagagaagggagtctggccaaggaaaagacacagaccttgcacaaatttatactactttttgctgtatttgatgaagggaaaagttggcactcagaaacaaagaactccttgatgcaggatagggatgctgcatctgctcgggcctggcctaaaatgcacacagtcaatggttatgtaaacaggtctctgccaggtctgattggatgccacaggaaatcagtctattggcatgtgattggaatgggcaccactcctgaagtgcactcaatattcctcgaaggtcacacatttcttgtgaggaaccatcgccaggctagcttggaaatctcgccaataactttccttactgctcaaacactcttgatggaccttggacagtttctactgttttgtcatatctcttcccaccaacatgatggcatggaagcttatgtcaaagtagacagctgtccagaggaaccccaactacgaatgaaaaataatgaagaagcggaagactatgatgatgatcttactgattctgaaatggatgtggtcaggtttgatgatgacaactctccttcctttatccaaattcgctcagttgccaagaagcatcctaaaacttgggtacattacattgctgctgaagaggaggactgggactatgctcccttagtcctcgcccccgatggcgcgccaggttctcctgctggctcccccacctcaacagaagaggggacaagcgaaagcgctacgcctgagagtggccctggctctgagccagccacctccggctctgaaacccctgcctcgagcgacagaagttataaaagtcaatatttgaacaatggccctcagcggattggtaggaagtacaaaaaagtccgatttatggcatacacagatgaaacctttaagactcgtgaagctattcagcatgaatcaggaatcttgggacctttactttatggggaagttggagacacactgttgattatatttaagaatcaagcaagcagaccatataacatctaccctcacggaatcactgatgtccgtcctttgtattcaaggagattaccaaaaggtgtaaaacatttgaaggattttccaattctgccaggagaaatattcaaatataaatggacagtgactgtagaagatgggccaactaaatcagatcctcggtgcctgacccgctattactctagtttcgttaatatggagagagatctagcttcaggactcattggccctctcctcatctgctacaaagaatctgtagatcaaagaggaaaccagataatgtcagacaagaggaatgtcatcctgttttctgtatttgatgagaaccgaagctggtacctcacagagaatatacaacgctttctccccaatccagctggagtgcagcttgaggatccagagttccaagcctccaacatcatgcacagcatcaatggctatgtttttgatagtttgcagttgtcagtttgtttgcatgaggtggcatactggtacattctaagcattggagcacagactgacttcctttctgtcttcttctctggatataccttcaaacacaaaatggtctatgaagacacactcaccctattcccattctcaggagaaactgtcttcatgtcgatggaaaacccaggtctatggattctggggtgccacaactcagactttcggaacagaggcatgaccgccttactgaaggtttctagttgtgacaagaacactggtgattattacgaggacagttatgaagatatttcagcatacttgctgagtaaaaacaatgccattgaaccaagaagcttctctcaaaacggcgcgccaagtcccgctggaagcccaactagcaccgaagaggggacctcagagtccgccacccccgagtccggccctggctctgagcctgccactagcggctccgagactcctggcacatccgaaagcgctacacccgagagtggacccggcacctctaccgagcccagtgagggctccgcccctggaacaagcaccgagcccagcgaaggcagcgccccagggacctccacagagcccagtgaaggcagtgctcctggcaccagcaccgaaccaagcgagggctctgcacccgggacctccaccgagccaagcgaaggctctgcccctggcacttccaccgagcccagcgaaggcagcgcccctgggagccccgctggctctcccaccagcactgaggagggcacatctaccgaaccaagtgaaggctctgcaccaggtgcctcgagcccaccagtcttgaaacgccatcaagctgaaataactcgtactactcttcagtcagatcaagaggaaatcgattatgatgataccatatcagttgaaatgaagaaggaagattttgacatttatgatgaggatgaaaatcagagcccccgcagctttcaaaagaaaacacgacactattttattgctgcagtggagaggctctgggattatgggatgagtagctccccacatgttctaagaaacagggctcagagtggcagtgtccctcagttcaagaaagttgttttccaggaatttactgatggctcctttactcagcccttataccgtggagaactaaatgaacatttgggactcctggggccatatataagagcagaagttgaagataatatcatggtaactttcagaaatcaggcctctcgtccctattccttctattctagccttatttcttatgaggaagatcagaggcaaggagcagaacctagaaaaaactttgtcaagcctaatgaaaccaaaacttacttttggaaagtgcaacatcatatggcacccactaaagatgagtttgactgcaaagcctgggcttatttctctgatgttgacctggaaaaagatgtgcactcaggcctgattggaccccttctggtctgccacactaacacactgaaccctgctcatgggagacaagtgacagtacaggaatttgctctgtttttcaccatctttgatgagaccaaaagctggtacttcactgaaaatatggaaagaaactgcagggctccctgcaatatccagatggaagatcccacttttaaagagaattatcgcttccatgcaatcaatggctacataatggatacactacctggcttagtaatggctcaggatcaaaggattcgatggtatctgctcagcatgggcagcaatgaaaacatccattctattcatttcagtggacatgtgttcactgtacgaaaaaaagaggagtataaaatggcactgtacaatctctatccaggtgtttttgagacagtggaaatgttaccatccaaagctggaatttggcgggtggaatgccttattggcgagcatctacatgctgggatgagcacactttttctggtgtacagcaataagtgtcagactcccctgggaatggcttctggacacattagagattttcagattacagcttcaggacaatatggacagtgggccccaaagctggccagacttcattattccggatcaatcaatgcctggagcaccaaggagcccttttcttggatcaaggtggatctgttggcaccaatgattattcacggcatcaagacccagggtgcccgtcagaagttctccagcctctacatctctcagtttatcatcatgtatagtcttgatgggaagaagtggcagacttatcgaggaaattccactggaaccttaatggtcttctttggcaatgtggattcatctgggataaaacacaatatttttaaccctccaattattgctcgatacatccgtttgcacccaactcattatagcattcgcagcactcttcgcatggagttgatgggctgtgatttaaatagttgcagcatgccattgggaatggagagtaaagcaatatcagatgcacagattactgcttcatcctactttaccaatatgtttgccacctggtctccttcaaaagctcgacttcacctccaagggaggagtaatgcctggagacctcaggtgaataatccaaaagagtggctgcaagtggacttccagaagacaatgaaagtcacaggagtaactactcagggagtaaaatctctgcttaccagcatgtatgtgaaggagttcctcatctccagcagtcaagatggccatcagtggactctcttttttcagaatggcaaagtaaaggtttttcagggaaatcaagactccttcacacctgtggtgaactctctagacccaccgttactgactcgctaccttcgaattcacccccagagttgggtgcaccagattgccctgaggatggaggttctgggctgcgaggcacaggacctctacggcgcgccaggtacctcagagtctgctacccccgagtcagggccaggatcagagccagccacctccgggtctgagacacccgggacttccgagagtgccacccctgagtccggacccgggtccgagcccgccacttccggctccgaaactcccggcacaagcgagagcgctaccccagagtcaggaccaggaacatctacagagccctctgaaggctccgctccagggtccccagccggcagtcccactagcaccgaggagggaacctctgaaagcgccacacccgaatcagggccagggtctgagcctgctaccagcggcagcgagacaccaggcacctctgagtccgccacaccagagtccggacccggatctcccgctgggagccccacctccactgaggagggatctcctgctggctctccaacatctactgaggaaggtacctcaaccgagccatccgagggatcagctcccggcacctcagagtcggcaaccccggagtctggacccggaacttccgaaagtgccacaccagagtccggtcccgggacttcagaatcagcaacacccgagtccggccctgggtctgaacccgccacaagtggtagtgagacaccaggatcagaacctgctacctcagggtcagagacacccggatctccggcaggctcaccaacctccactgaggagggcaccagcacagaaccaagcgagggctccgcacccggaacaagcactgaacccagtgagggttcagcacccggctctgagccggccacaagtggcagtgagacacccggcacttcagagagtgccacccccgagagtggcccaggcactagtaccgagccctctgaaggcagtgcgccagcctcgagcgaacaaaaactcatctcagaagaggatctgtcacctgcaaccggtcatcatcaccatcaccattga

SEQ ID NO: 1375 - protein, 1948 aa, synthetic construct
  REGION 1..1948: note = Description of Artificial Sequence: Synthetic polypeptide
ATRRYYLGAVELSWDYMQSDLGELPVDARFPPRVPKSFPFNTSVVYKKTLFVEFTDHLFNIAKPRPPWMGLLGPTIQAEVYDTVVITLKNMASHPVSLHAVGVSYWKASEGAEYDDQTSQREKEDDKVFPGGSHTYVWQVLKENGPMASDPLCLTYSYLSHVDLVKDLNSGLIGALLVCREGSLAKEKTQTLHKFILLFAVFDEGKSWHSETKNSLMQDRDAASARAWPKMHTVNGYVNRSLPGLIGCHRKSVYWHVIGMGTTPEVHSIFLEGHTFLVRNHRQASLEISPITFLTAQTLLMDLGQFLLFCHISSHQHDGMEAYVKVDSCPEEPQLRMKNNEEAEDYDDDLTDSEMDVVRFDDDNSPSFIQIRSVAKKHPKTWVHYIAAEEEDWDYAPLVLAPDDRSYKSQYLNNGPQRIGRKYKKVRFMAYTDETFKTREAIQHESGILGPLLYGEVGDTLLIIFKNQASRPYNIYPHGITDVRPLYSRRLPKGVKHLKDFPILPGEIFKYKWTVTVEDGPTKSDPRCLTRYYSSFVNMERDLASGLIGPLLICYKESVDQRGNQIMSDKRNVILFSVFDENRSWYLTENIQRFLPNPAGVQLEDPEFQASNIMHSINGYVFDSLQLSVCLHEVAYWYILSIGAQTDFLSVFFSGYTFKHKMVYEDTLTLFPFSGETVFMSMENPGLWILGCHNSDFRNRGMTALLKVSSCDKNTGDYYEDSYEDISAYLLSKNNAIEPRSFSQNGAPSPAGSPTSTEEGTSESATPESGPGSEPATSGSETPGTSESATPESGPGTSTEPSEGSAPGTSTEPSEGSAPGTSTEPSEGSAPGTSTEPSEGSAPGTSTEPSEGSAPGTSTEPSEGSAPGSPAGSPTSTEEGTSTEPSEGSAPGASSPPVLKRHQAEITRTTLQSDQEEIDYDDTISVEMKKEDFDIYDEDENQSPRSFQKKTRHYFIAAVERLWDYGMSSSPHVLRNRAQGAPGSPAGSPTSTEEGTSESATPESGPGSEPATSGSETPASSRAQSGSVPQFKKVVFQEFTDGSFTQPLYRGELNEHLGLLGPYIRAEVEDNIMVTFRNQASRPYSFYSSLISYEEDQRQGAEPRKNFVKPNETKTYFWKVQHHMAPTKDEFDCKAWAYFSDVDLEKDVHSGLIGPLLVCHTNTLNPAHGRQVTVQEFALFFTIFDETKSWYFTENMERNCRAPCNIQMEDPTFKENYRFHAINGYIMDTLPGLVMAQDQRIRWYLLSMGSNENIHSIHFSGHVFTVRKKEEYKMALYNLYPGVFETVEMLPSKAGIWRVECLIGEHLHAGMSTLFLVYSNKCQTPLGMASGHIRDFQITASGQYGQWAPKLARLHYSGSINAWSTKEPFSWIKVDLLAPMIIHGIKTQGARQKFSSLYISQFIIMYSLDGKKWQTYRGNSTGTLMVFFGNVDSSGIKHNIFNPPIIARYIRLHPTHYSIRSTLRMELMGCDLNSCSMPLGMESKAISDAQITASSYFTNMFATWSPSKARLHLQGRSNAWRPQVNNPKEWLQVDFQKTMKVTGVTTQGVKSLLTSMYVKEFLISSSQDGHQWTLFFQNGKVKVFQGNQDSFTPVVNSLDPPLLTRYLRIHPQSWVHQIALRMEVLGCEAQDLYGAPGTSESATPESGPGSEPATSGSETPGTSESATPESGPGSEPATSGSETPGTSESATPESGPGTSTEPSEGSAPGSPAGSPTSTEEGTSESATPESGPGSEPATSGSETPGTSESATPESGPGSPAGSPTSTEEGSPAGSPTSTEEGTSTEPSEGSAPGTSESATPESGPGTSESATPESGPGTSESATPESGPGSEPATSGSETPGSEPATSGSETPGSPAGSPTSTEEGTSTEPSEGSAPGTSTEPSEGSAPGSEPATSGSETPGTSESATPESGPGTSTEPSEGSAPASSEQKLISEEDLSPATGHHHHHH

SEQ ID NO: 1376 - DNA, 5847 bp, synthetic construct
  misc_feature 1..5847: note = Description of Artificial Sequence: Synthetic polynucleotide
  source 1..5847: mol_type = other DNA
gccaccagaagatactacctgggtgcagtggaactgtcatgggactatatgcaaagtgatctcggtgagctgcctgtggacgcaagatttcctcctagagtgccaaaatcttttccattcaacacctcagtcgtgtacaaaaagactctgtttgtagaattcacggatcaccttttcaacatcgctaagccaaggccaccctggatgggtctgctaggtcctaccatccaggctgaggtttatgatacagtggtcattacacttaagaacatggcttcccatcctgtcagtcttcatgctgttggtgtatcctactggaaagcttctgagggagctgaatatgatgatcagaccagtcaaagggagaaagaagatgataaagtcttccctggtggaagccatacatatgtctggcaggtcctgaaagagaatggtccaatggcctctgacccactgtgccttacctactcatatctttctcatgtggacctggtaaaagacttgaattcaggcctcattggagccctactagtatgtagagaagggagtctggccaaggaaaagacacagaccttgcacaaatttatactactttttgctgtatttgatgaagggaaaagttggcactcagaaacaaagaactccttgatgcaggatagggatgctgcatctgctcgggcctggcctaaaatgcacacagtcaatggttatgtaaacaggtctctgccaggtctgattggatgccacaggaaatcagtctattggcatgtgattggaatgggcaccactcctgaagtgcactcaatattcctcgaaggtcacacatttcttgtgaggaaccatcgccaggctagcttggaaatctcgccaataactttccttactgctcaaacactcttgatggaccttggacagtttctactgttttgtcatatctcttcccaccaacatgatggcatggaagcttatgtcaaagtagacagctgtccagaggaaccccaactacgaatgaaaaataatgaagaagcggaagactatgatgatgatcttactgattctgaaatggatgtggtcaggtttgatgatgacaactctccttcctttatccaaattcgctcagttgccaagaagcatcctaaaacttgggtacattacattgctgctgaagaggaggactgggactatgctcccttagtcctcgcccccgatgacagaagttataaaagtcaatatttgaacaatggccctcagcggattggtaggaagtacaaaaaagtccgatttatggcatacacagatgaaacctttaagactcgtgaagctattcagcatgaatcaggaatcttgggacctttactttatggggaagttggagacacactgttgattatatttaagaatcaagcaagcagaccatataacatctaccctcacggaatcactgatgtccgtcctttgtattcaaggagattaccaaaaggtgtaaaacatttgaaggattttccaattctgccaggagaaatattcaaatataaatggacagtgactgtagaagatgggccaactaaatcagatcctcggtgcctgacccgctattactctagtttcgttaatatggagagagatctagcttcaggactcattggccctctcctcatctgctacaaagaatctgtagatcaaagaggaaaccagataatgtcagacaagaggaatgtcatcctgttttctgtatttgatgagaaccgaagctggtacctcacagagaatatacaacgctttctccccaatccagctggagtgcagcttgaggatccagagttccaagcctccaacatcatgcacagcatcaatggctatgtttttgatagtttgcagttgtcagtttgtttgcatgaggtggcatactggtacattctaagcattggagcacagactgacttcctttctgtcttcttctctggatataccttcaaacacaaaatggtctatgaagacacactcaccctattcccattctcaggagaaactgtcttcatgtcgatggaaaacccaggtctatggattctggggtgccacaactcagactttcggaacagaggcatgaccgccttactgaaggtttctagttgtgacaagaacactggtgattattacgaggacagttatgaagatatttcagcatacttgctgagtaaaaacaatgccattgaaccaagaagcttctctcaaaacggcgcgccaagtcccgctggaagcccaactagcaccgaagaggggacctcagagtccgccacccccgagtccggccctggctctgagcctgccactagcggctccgagactcctggcacatccgaaagcgctacacccgagagtggacccggcacctctaccgagcccagtgagggctccgcccctggaacaagcaccgagcccagcgaaggcagcgccccagggacctccacagagcccagtgaaggcagtgctcctggcaccagcaccgaaccaagcgagggctctgcacccgggacctccaccgagccaagcgaaggctctgcccctggcacttccaccgagcccagcgaaggcagcgcccctgggagccccgctggctctcccaccagcactgaggagggcacatctaccgaaccaagtgaaggctctgcaccaggtgcctcgagcccaccagtcttgaaacgccatcaagctgaaataactcgtactactcttcagtcagatcaagaggaaatcgattatgatgataccatatcagttgaaatgaagaaggaagattttgacatttatgatgaggatgaaaatcagagcccccgcagctttcaaaagaaaacacgacactattttattgctgcagtggagaggctctgggattatgggatgagtagctccccacatgttctaagaaacagggctcagggcgcgccaggttctcctgctggctcccccacctcaacagaagaggggacaagcgaaagcgctacgcctgagagtggccctggctctgagccagccacctccggctctgaaacccctgcctcgagcagggctcagagtggcagtgtccctcagttcaagaaagttgttttccaggaatttactgatggctcctttactcagcccttataccgtggagaactaaatgaacatttgggactcctggggccatatataagagcagaagttgaagataatatcatggtaactttcagaaatcaggcctctcgtccctattccttctattctagccttatttcttatgaggaagatcagaggcaaggagcagaacctagaaaaaactttgtcaagcctaatgaaaccaaaacttacttttggaaagtgcaacatcatatggcacccactaaagatgagtttgactgcaaagcctgggcttatttctctgatgttgacctggaaaaagatgtgcactcaggcctgattggaccccttctggtctgccacactaacacactgaaccctgctcatgggagacaagtgacagtacaggaatttgctctgtttttcaccatctttgatgagaccaaaagctggtacttcactgaaaatatggaaagaaactgcagggctccctgcaatatccagatggaagatcccacttttaaagagaattatcgcttccatgcaatcaatggctacataatggatacactacctggcttagtaatggctcaggatcaaaggattcgatggtatctgctcagcatgggcagcaatgaaaacatccattctattcatttcagtggacatgtgttcactgtacgaaaaaaagaggagtataaaatggcactgtacaatctctatccaggtgtttttgagacagtggaaatgttaccatccaaagctggaatttggcgggtggaatgccttattggcgagcatctacatgctgggatgagcacactttttctggtgtacagcaataagtgtcagactcccctgggaatggcttctggacacattagagattttcagattacagcttcaggacaatatggacagtgggccccaaagctggccagacttcattattccggatcaatcaatgcctggagcaccaaggagcccttttcttggatcaaggtggatctgttggcaccaatgattattcacggcatcaagacccagggtgcccgtcagaagttctccagcctctacatctctcagtttatcatcatgtatagtcttgatgggaagaagtggcagacttatcgaggaaattccactggaaccttaatggtcttctttggcaatgtggattcatctgggataaaacacaatatttttaaccctccaattattgctcgatacatccgtttgcacccaactcattatagcattcgcagcactcttcgcatggagttgatgggctgtgatttaaatagttgcagcatgccattgggaatggagagtaaagcaatatcagatgcacagattactgcttcatcctactttaccaatatgtttgccacctggtctccttcaaaagctcgacttcacctccaagggaggagtaatgcctggagacctcaggtgaataatccaaaagagtggctgcaagtggacttccagaagacaatgaaagtcacaggagtaactactcagggagtaaaatctctgcttaccagcatgtatgtgaaggagttcctcatctccagcagtcaagatggccatcagtggactctcttttttcagaatggcaaagtaaaggtttttcagggaaatcaagactccttcacacctgtggtgaactctctagacccaccgttactgactcgctaccttcgaattcacccccagagttgggtgcaccagattgccctgaggatggaggttctgggctgcgaggcacaggacctctacggcgcgccaggtacctcagagtctgctacccccgagtcagggccaggatcagagccagccacctccgggtctgagacacccgggacttccgagagtgccacccctgagtccggacccgggtccgagcccgccacttccggctccgaaactcccggcacaagcgagagcgctaccccagagtcaggaccaggaacatctacagagccctctgaaggctccgctccagggtccccagccggcagtcccactagcaccgaggagggaacctctgaaagcgccacacccgaatcagggccagggtctgagcctgctaccagcggcagcgagacaccaggcacctctgagtccgccacaccagagtccggacccggatctcccgctgggagccccacctccactgaggagggatctcctgctggctctccaacatctactgaggaaggtacctcaaccgagccatccgagggatcagctcccggcacctcagagtcggcaaccccggagtctggacccggaacttccgaaagtgccacaccagagtccggtcccgggacttcagaatcagcaacacccgagtccggccctgggtctgaacccgccacaagtggtagtgagacaccaggatcagaacctgctacctcagggtcagagacacccggatctccggcaggctcaccaacctccactgaggagggcaccagcacagaaccaagcgagggctccgcacccggaacaagcactgaacccagtgagggttcagcacccggctctgagccggccacaagtggcagtgagacacccggcacttcagagagtgccacccccgagagtggcccaggcactagtaccgagccctctgaaggcagtgcgccagcctcgagcgaacaaaaactcatctcagaagaggatctgtcacctgcaaccggtcatcatcaccatcaccattga

SEQ ID NO: 1377 - protein, 1945 aa, synthetic construct
  REGION 1..1945: note = Description of Artificial Sequence: Synthetic polypeptide
ATRRYYLGAVELSWDYMQSDLGELPVDARFPPRVPKSFPFNTSVVYKKTLFVEFTDHLFNIAKPRPPWMGLLGPTIQAEVYDTVVITLKNMASHPVSLHAVGVSYWKASEGAEYDDQTSQREKEDDKVFPGGSHTYVWQVLKENGPMASDPLCLTYSYLSHVDLVKDLNSGLIGALLVCREGSLAKEKTQTLHKFILLFAVFDEGKSWHSETKNSLMQDRDAASARAWPKMHTVNGYVNRSLPGLIGCHRKSVYWHVIGMGTTPEVHSIFLEGHTFLVRNHRQASLEISPITFLTAQTLLMDLGQFLLFCHISSHQHDGMEAYVKVDSCPEEPQLRMKNNEEAEDYDDDLTDSEMDVVRFDDDNSPSFIQIRSVAKKHPKTWVHYIAAEEEDWDYAPLVLAPDDRSYKSQYLNNGPQRIGRKYKKVRFMAYTDETFKTREAIQHESGILGPLLYGEVGDTLLIIFKNQASRPYNIYPHGITDVRPLYSRRLPKGVKHLKDFPILPGEIFKYKWTVTVEDGPTKSDPRCLTRYYSSFVNMERDLASGLIGPLLICYKESVDQRGNQIMSDKRNVILFSVFDENRSWYLTENIQRFLPNPAGVQLEDPEFQASNIMHSINGYVFDSLQLSVCLHEVAYWYILSIGAQTDFLSVFFSGYTFKHKMVYEDTLTLFPFSGETVFMSMENPGLWILGCHNSDFRNRGMTALLKVSSCDKNTGDYYEDSYEDISAYLLSKNNAIEPRSFSQNGAPSPAGSPTSTEEGTSESATPESGPGSEPATSGSETPGTSESATPESGPGTSTEPSEGSAPGTSTEPSEGSAPGTSTEPSEGSAPGTSTEPSEGSAPGTSTEPSEGSAPGTSTEPSEGSAPGSPAGSPTSTEEGTSTEPSEGSAPGASSPPVLKRHQAEITRTTLQSDQEEIDYDDTISVEMKKEDFDIYDEDENQSPRSFQKKTRHYFIAAVERLWDYGMSSSPHVLRNRAQSGSVPQFKKVVFQEFTDGSFTQPLYRGELNEHLGLLGPYIRAEVEDNIMVTFRNQASRPYSFYSSLISYEEDQRQGAEPRKNFVKPNETKTYFWKVQHHMAPTKDEFDCKAWAYFSDVDLEKDVHSGLIGPLLVCHTNTLNPAHGRQVTVQEFALFFTIFDETKSWYFTENMERNCRGAPGSPAGSPTSTEEGTSESATPESGPGSEPATSGSETPASSAPCNIQMEDPTFKENYRFHAINGYIMDTLPGLVMAQDQRIRWYLLSMGSNENIHSIHFSGHVFTVRKKEEYKMALYNLYPGVFETVEMLPSKAGIWRVECLIGEHLHAGMSTLFLVYSNKCQTPLGMASGHIRDFQITASGQYGQWAPKLARLHYSGSINAWSTKEPFSWIKVDLLAPMIIHGIKTQGARQKFSSLYISQFIIMYSLDGKKWQTYRGNSTGTLMVFFGNVDSSGIKHNIFNPPIIARYIRLHPTHYSIRSTLRMELMGCDLNSCSMPLGMESKAISDAQITASSYFTNMFATWSPSKARLHLQGRSNAWRPQVNNPKEWLQVDFQKTMKVTGVTTQGVKSLLTSMYVKEFLISSSQDGHQWTLFFQNGKVKVFQGNQDSFTPVVNSLDPPLLTRYLRIHPQSWVHQIALRMEVLGCEAQDLYGAPGTSESATPESGPGSEPATSGSETPGTSESATPESGPGSEPATSGSETPGTSESATPESGPGTSTEPSEGSAPGSPAGSPTSTEEGTSESATPESGPGSEPATSGSETPGTSESATPESGPGSPAGSPTSTEEGSPAGSPTSTEEGTSTEPSEGSAPGTSESATPESGPGTSESATPESGPGTSESATPESGPGSEPATSGSETPGSEPATSGSETPGSPAGSPTSTEEGTSTEPSEGSAPGTSTEPSEGSAPGSEPATSGSETPGTSESATPESGPGTSTEPSEGSAPASSEQKLISEEDLSPATGHHHHHH

SEQ ID NO: 1378 - DNA, 5838 bp, synthetic construct
  misc_feature 1..5838: note = Description of Artificial Sequence: Synthetic polynucleotide
  source 1..5838: mol_type = other DNA
gccaccagaagatactacctgggtgcagtggaactgtcatgggactatatgcaaagtgatctcggtgagctgcctgtggacgcaagatttcctcctagagtgccaaaatcttttccattcaacacctcagtcgtgtacaaaaagactctgtttgtagaattcacggatcaccttttcaacatcgctaagccaaggccaccctggatgggtctgctaggtcctaccatccaggctgaggtttatgatacagtggtcattacacttaagaacatggcttcccatcctgtcagtcttcatgctgttggtgtatcctactggaaagcttctgagggagctgaatatgatgatcagaccagtcaaagggagaaagaagatgataaagtcttccctggtggaagccatacatatgtctggcaggtcctgaaagagaatggtccaatggcctctgacccactgtgccttacctactcatatctttctcatgtggacctggtaaaagacttgaattcaggcctcattggagccctactagtatgtagagaagggagtctggccaaggaaaagacacagaccttgcacaaatttatactactttttgctgtatttgatgaagggaaaagttggcactcagaaacaaagaactccttgatgcaggatagggatgctgcatctgctcgggcctggcctaaaatgcacacagtcaatggttatgtaaacaggtctctgccaggtctgattggatgccacaggaaatcagtctattggcatgtgattggaatgggcaccactcctgaagtgcactcaatattcctcgaaggtcacacatttcttgtgaggaaccatcgccaggctagcttggaaatctcgccaataactttccttactgctcaaacactcttgatggaccttggacagtttctactgttttgtcatatctcttcccaccaacatgatggcatggaagcttatgtcaaagtagacagctgtccagaggaaccccaactacgaatgaaaaataatgaagaagcggaagactatgatgatgatcttactgattctgaaatggatgtggtcaggtttgatgatgacaactctccttcctttatccaaattcgctcagttgccaagaagcatcctaaaacttgggtacattacattgctgctgaagaggaggactgggactatgctcccttagtcctcgcccccgatgacagaagttataaaagtcaatatttgaacaatggccctcagcggattggtaggaagtacaaaaaagtccgatttatggcatacacagatgaaacctttaagactcgtgaagctattcagcatgaatcaggaatcttgggacctttactttatggggaagttggagacacactgttgattatatttaagaatcaagcaagcagaccatataacatctaccctcacggaatcactgatgtccgtcctttgtattcaaggagattaccaaaaggtgtaaaacatttgaaggattttccaattctgccaggagaaatattcaaatataaatggacagtgactgtagaagatgggccaactaaatcagatcctcggtgcctgacccgctattactctagtttcgttaatatggagagagatctagcttcaggactcattggccctctcctcatctgctacaaagaatctgtagatcaaagaggaaaccagataatgtcagacaagaggaatgtcatcctgttttctgtatttgatgagaaccgaagctggtacctcacagagaatatacaacgctttctccccaatccagctggagtgcagcttgaggatccagagttccaagcctccaacatcatgcacagcatcaatggctatgtttttgatagtttgcagttgtcagtttgtttgcatgaggtggcatactggtacattctaagcattggagcacagactgacttcctttctgtcttcttctctggatataccttcaaacacaaaatggtctatgaagacacactcaccctattcccattctcaggagaaactgtcttcatgtcgatggaaaacccaggtctatggattctggggtgccacaactcagactttcggaacagaggcatgaccgccttactgaaggtttctagttgtgacaagaacactggtgattattacgaggacagttatgaagatatttcagcatacttgctgagtaaaaacaatgccattgaaccaagaagcttctctcaaaacggcgcgccaagtcccgctggaagcccaactagcaccgaagaggggacctcagagtccgccacccccgagtccggccctggctctgagcctgccactagcggctccgagactcctggcacatccgaaagcgctacacccgagagtggacccggcacctctaccgagcccagtgagggctccgcccctggaacaagcaccgagcccagcgaaggcagcgccccagggacctccacagagcccagtgaaggcagtgctcctggcaccagcaccgaaccaagcgagggctctgcacccgggacctccaccgagccaagcgaaggctctgcccctggcacttccaccgagcccagcgaaggcagcgcccctgggagccccgctggctctcccaccagcactgaggagggcacatctaccgaaccaagtgaaggctctgcaccaggtgcctcgagcccaccagtcttgaaacgccatcaagctgaaataactcgtactactcttcagtcagatcaagaggaaatcgattatgatgataccatatcagttgaaatgaagaaggaagattttgacatttatgatgaggatgaaaatcagagcccccgcagctttcaaaagaaaacacgacactattttattgctgcagtggagaggctctgggattatgggatgagtagctccccacatgttctaagaaacagggctcagagtggcagtgtccctcagttcaagaaagttgttttccaggaatttactgatggctcctttactcagcccttataccgtggagaactaaatgaacatttgggactcctggggccatatataagagcagaagttgaagataatatcatggtaactttcagaaatcaggcctctcgtccctattccttctattctagccttatttcttatgaggaagatcagaggcaaggagcagaacctagaaaaaactttgtcaagcctaatgaaaccaaaacttacttttggaaagtgcaacatcatatggcacccactaaagatgagtttgactgcaaagcctgggcttatttctctgatgttgacctggaaaaagatgtgcactcaggcctgattggaccccttctggtctgccacactaacacactgaaccctgctcatgggagacaagtgacagtacaggaatttgctctgtttttcaccatctttgatgagaccaaaagctggtacttcactgaaaatatggaaagaaactgcaggggcgcgccaggttctcctgctggctcccccacctcaacagaagaggggacaagcgaaagcgctacgcctgagagtggccctggctctgagccagccacctccggctctgaaacccctgcctcgagcgctccctgcaatatccagatggaagatcccacttttaaagagaattatcgcttccatgcaatcaatggctacataatggatacactacctggcttagtaatggctcaggatcaaaggattcgatggtatctgctcagcatgggcagcaatgaaaacatccattctattcatttcagtggacatgtgttcactgtacgaaaaaaagaggagtataaaatggcactgtacaatctctatccaggtgtttttgagacagtggaaatgttaccatccaaagctggaatttggcgggtggaatgccttattggcgagcatctacatgctgggatgagcacactttttctggtgtacagcaataagtgtcagactcccctgggaatggcttctggacacattagagattttcagattacagcttcaggacaatatggacagtgggccccaaagctggccagacttcattattccggatcaatcaatgcctggagcaccaaggagcccttttcttggatcaaggtggatctgttggcaccaatgattattcacggcatcaagacccagggtgcccgtcagaagttctccagcctctacatctctcagtttatcatcatgtatagtcttgatgggaagaagtggcagacttatcgaggaaattccactggaaccttaatggtcttctttggcaatgtggattcatctgggataaaacacaatatttttaaccctccaattattgctcgatacatccgtttgcacccaactcattatagcattcgcagcactcttcgcatggagttgatgggctgtgatttaaatagttgcagcatgccattgggaatggagagtaaagcaatatcagatgcacagattactgcttcatcctactttaccaatatgtttgccacctggtctccttcaaaagctcgacttcacctccaagggaggagtaatgcctggagacctcaggtgaataatccaaaagagtggctgcaagtggacttccagaagacaatgaaagtcacaggagtaactactcagggagtaaaatctctgcttaccagcatgtatgtgaaggagttcctcatctccagcagtcaagatggccatcagtggactctcttttttcagaatggcaaagtaaaggtttttcagggaaatcaagactccttcacacctgtggtgaactctctagacccaccgttactgactcgctaccttcgaattcacccccagagttgggtgcaccagattgccctgaggatggaggttctgggctgcgaggcacaggacctctacggcgcgccaggtacctcagagtctgctacccccgagtcagggccaggatcagagccagccacctccgggtctgagacacccgggacttccgagagtgccacccctgagtccggacccgggtccgagcccgccacttccggctccgaaactcccggcacaagcgagagcgctaccccagagtcaggaccaggaacatctacagagccctctgaaggctccgctccagggtccccagccggcagtcccactagcaccgaggagggaacctctgaaagcgccacacccgaatcagggccagggtctgagcctgctaccagcggcagcgagacaccaggcacctctgagtccgccacaccagagtccggacccggatctcccgctgggagccccacctccactgaggagggatctcctgctggctctccaacatctactgaggaaggtacctcaaccgagccatccgagggatcagctcccggcacctcagagtcggcaaccccggagtctggacccggaacttccgaaagtgccacaccagagtccggtcccgggacttcagaatcagcaacacccgagtccggccctgggtctgaacccgccacaagtggtagtgagacaccaggatcagaacctgctacctcagggtcagagacacccggatctccggcaggctcaccaacctccactgaggagggcaccagcacagaaccaagcgagggctccgcacccggaacaagcactgaacccagtgagggttcagcacccggctctgagccggccacaagtggcagtgagacacccggcacttcagagagtgccacccccgagagtggcccaggcactagtaccgagccctctgaaggcagtgcgccagcctcgagcgaacaaaaactcatctcagaagaggatctgtcacctgcaaccggtcatcatcaccatcaccattga

SEQ ID NO: 1379 - protein, 2053 aa, synthetic construct; identical to SEQ ID NO: 1143
  REGION 1..2053: note = Description of Artificial Sequence: Synthetic polypeptide

SEQ ID NO: 1380 - DNA, 6162 bp, synthetic construct; identical to SEQ ID NO: 1144
  misc_feature 1..6162: note = Description of Artificial Sequence: Synthetic polynucleotide
  source 1..6162: mol_type = other DNA

SEQ ID NO: 1381 - protein, 2056 aa, synthetic construct
  REGION 1..2056: note = Description of Artificial Sequence: Synthetic polypeptide
ATRRYYLGAVELSWDYMQSDLGELPVDARFPPRVPKSFPFNTSVVYKKTLFVEFTDHLFNIAKPRPPWMGLLGPTIQAEVYDTVVITLKNMASHPVSLHAVGVSYWKASEGAEYDDQTSQREKEDDKVFPGGSHTYVWQVLKENGPMASDPLCLTYSYLSHVDLVKDLNSGLIGALLVCREGSLAKEKTQTLHKFILLFAVFDEGKSWHSETKNSLMQDRDAASARAWPKMHTVNGYVNRSLPGLIGCHRKSVYWHVIGMGTTPEVHSIFLEGHTFLVRNHRQASLEISPITFLTAQTLLMDLGQFLLFCHISSHQHDGMEAYVKVDSCPEEPQLRMKNNEEAEDYDDDLTDSEMDVVRFDDDNSPSFIQIRSVAKKHPKTWVHYIAAEEEDWDYAPLVLAPDDRSYKSQYLNNGPQRIGRKYKKVRFMAYTDETFKTREAIQHESGILGPLLYGEVGDTLLIIFKNQASRPYNIYPHGITDVRPLYSRRLPKGVKHLKDFPILPGEIFKYKWTVTVEDGPTKSDPRCLTRYYSSFVNMERDLASGLIGPLLICYKESVDQRGNQIMSDKRNVILFSVFDENRSWYLTENIQRFLPNPAGVQLEDPEFQASNIMHSINGYVFDSLQLSVCLHEVAYWYILSIGAQTDFLSVFFSGYTFKHKMVYEDTLTLFPFSGETVFMSMENPGLWILGCHNSDFRNRGMTALLKVSSCDKNTGDYYEDSYEDISAYLLSKNNAIEPRSFSQNGAPSPAGSPTSTEEGTSESATPESGPGSEPATSGSETPGTSESATPESGPGTSTEPSEGSAPGTSTEPSEGSAPGTSTEPSEGSAPGTSTEPSEGSAPGTSTEPSEGSAPGTSTEPSEGSAPGSPAGSPTSTEEGTSTEPSEGSAPGASSPPVLKRHQAEITRTTLQSDQEEIDYDDTISVEMKKEDFDIYDEDENQSPRSFQKKTRHYFIAAVERLWDYGMSSSPHVLRNRAQGAPTSESATPESGPGSEPATSGSETPGTSESATPESGPGSEPATSGSETPGTSESATPESGPGTSTEPSEGSAPGTSESATPESGPGSPAGSPTSTEEGSPAGSPTSTEEGSPAGSPTSTEEGTSESATPESGPGTSTEPSEGSAPGASSRAQSGSVPQFKKVVFQEFTDGSFTQPLYRGELNEHLGLLGPYIRAEVEDNIMVTFRNQASRPYSFYSSLISYEEDQRQGAEPRKNFVKPNETKTYFWKVQHHMAPTKDEFDCKAWAYFSDVDLEKDVHSGLIGPLLVCHTNTLNPAHGRQVTVQEFALFFTIFDETKSWYFTENMERNCRAPCNIQMEDPTFKENYRFHAINGYIMDTLPGLVMAQDQRIRWYLLSMGSNENIHSIHFSGHVFTVRKKEEYKMALYNLYPGVFETVEMLPSKAGIWRVECLIGEHLHAGMSTLFLVYSNKCQTPLGMASGHIRDFQITASGQYGQWAPKLARLHYSGSINAWSTKEPFSWIKVDLLAPMIIHGIKTQGARQKFSSLYISQFIIMYSLDGKKWQTYRGNSTGTLMVFFGNVDSSGIKHNIFNPPIIARYIRLHPTHYSIRSTLRMELMGCDLNSCSMPLGMESKAISDAQITASSYFTNMFATWSPSKARLHLQGRSNAWRPQVNNPKEWLQVDFQKTMKVTGVTTQGVKSLLTSMYVKEFLISSSQDGHQWTLFFQNGKVKVFQGNQDSFTPVVNSLDPPLLTRYLRIHPQSWVHQIALRMEVLGCEAQDLYGAPGTSESATPESGPGSEPATSGSETPGTSESATPESGPGSEPATSGSETPGTSESATPESGPGTSTEPSEGSAPGSPAGSPTSTEEGTSESATPESGPGSEPATSGSETPGTSESATPESGPGSPAGSPTSTEEGSPAGSPTSTEEGTSTEPSEGSAPGTSESATPESGPGTSESATPESGPGTSESATPESGPGSEPATSGSETPGSEPATSGSETPGSPAGSPTSTEEGTSTEPSEGSAPGTSTEPSEGSAPGSEPATSGSETPGTSESATPESGPGTSTEPSEGSAPASSEQKLISEEDLSPATGHHHHHH

SEQ ID NO: 1382 - DNA, 6171 bp, synthetic construct
  misc_feature 1..6171: note = Description of Artificial Sequence: Synthetic polynucleotide
  source 1..6171: mol_type = other DNA
gccaccagaagatactacctgggtgcagtggaactgtcatgggactatatgcaaagtgatctcggtgagctgcctgtggacgcaagatttcctcctagagtgccaaaatcttttccattcaacacctcagtcgtgtacaaaaagactctgtttgtagaattcacggatcaccttttcaacatcgctaagccaaggccaccctggatgggtctgctaggtcctaccatccaggctgaggtttatgatacagtggtcattacacttaagaacatggcttcccatcctgtcagtcttcatgctgttggtgtatcctactggaaagcttctgagggagctgaatatgatgatcagaccagtcaaagggagaaagaagatgataaagtcttccctggtggaagccatacatatgtctggcaggtcctgaaagagaatggtccaatggcctctgacccactgtgccttacctactcatatctttctcatgtggacctggtaaaagacttgaattcaggcctcattggagccctactagtatgtagagaagggagtctggccaaggaaaagacacagaccttgcacaaatttatactactttttgctgtatttgatgaagggaaaagttggcactcagaaacaaagaactccttgatgcaggatagggatgctgcatctgctcgggcctggcctaaaatgcacacagtcaatggttatgtaaacaggtctctgccaggtctgattggatgccacaggaaatcagtctattggcatgtgattggaatgggcaccactcctgaagtgcactcaatattcctcgaaggtcacacatttcttgtgaggaaccatcgccaggctagcttggaaatctcgccaataactttccttactgctcaaacactcttgatggaccttggacagtttctactgttttgtcatatctcttcccaccaacatgatggcatggaagcttatgtcaaagtagacagctgtccagaggaaccccaactacgaatgaaaaataatgaagaagcggaagactatgatgatgatcttactgattctgaaatggatgtggtcaggtttgatgatgacaactctccttcctttatccaaattcgctcagttgccaagaagcatcctaaaacttgggtacattacattgctgctgaagaggaggactgggactatgctcccttagtcctcgcccccgatgacagaagttataaaagtcaatatttgaacaatggccctcagcggattggtaggaagtacaaaaaagtccgatttatggcatacacagatgaaacctttaagactcgtgaagctattcagcatgaatcaggaatcttgggacctttactttatggggaagttggagacacactgttgattatatttaagaatcaagcaagcagaccatataacatctaccctcacggaatcactgatgtccgtcctttgtattcaaggagattaccaaaaggtgtaaaacatttgaaggattttccaattctgccaggagaaatattcaaatataaatggacagtgactgtagaagatgggccaactaaatcagatcctcggtgcctgacccgctattactctagtttcgttaatatggagagagatctagcttcaggactcattggccctctcctcatctgctacaaagaatctgtagatcaaagaggaaaccagataatgtcagacaagaggaatgtcatcctgttttctgtatttgatgagaaccgaagctggtacctcacagagaatatacaacgctttctccccaatccagctggagtgcagcttgaggatccagagttccaagcctccaacatcatgcacagcatcaatggctatgtttttgatagtttgcagttgtcagtttgtttgcatgaggtggcatactggtacattctaagcattggagcacagactgacttcctttctgtcttcttctctggatataccttcaaacacaaaatggtctatgaagacacactcaccctattcccattctcaggagaaactgtcttcatgtcgatggaaaacccaggtctatggattctggggtgccacaactcagactttcggaacagaggcatgaccgccttactgaaggtttctagttgtgacaagaacactggtgattattacgaggacagttatgaagatatttcagcatacttgctgagtaaaaacaatgccattgaaccaagaagcttctctcaaaacggcgcgccaagtcccgctggaagcccaactagcaccgaagaggggacctcagagtccgccacccccgagtccggccctggctctgagcctgccactagcggctccgagactcctggcacatccgaaagcgctacacccgagagtggacccggcacctctaccgagcccagtgagggctccgcccctggaacaagcaccgagcccagcgaaggcagcgccccagggacctccacagagcccagtgaaggcagtgctcctggcaccagcaccgaaccaagcgagggctctgcacccgggacctccaccgagccaagcgaaggctctgcccctggcacttccaccgagcccagcgaaggcagcgcccctgggagccccgctggctctcccaccagcactgaggagggcacatctaccgaaccaagtgaaggctctgcaccaggtgcctcgagcccaccagtcttgaaacgccatcaagctgaaataactcgtactactcttcagtcagatcaagaggaaatcgattatgatgataccatatcagttgaaatgaagaaggaagattttgacatttatgatgaggatgaaaatcagagcccccgcagctttcaaaagaaaacacgacactattttattgctgcagtggagaggctctgggattatgggatgagtagctccccacatgttctaagaaacagggctcagggcgcgccaacgtccgaaagtgctacccctgagtcaggccctggtagtgagcctgccacaagcggaagcgaaactccggggacctcagagtctgccactcccgaatcggggccaggctctgaaccggccacttcagggagcgaaacaccaggaacatcggagagcgctaccccggagagcgggccaggaactagtactgagcctagcgagggaagtgcacctggtacaagcgagtccgccacacccgagtctggccctggctctccagcgggctcacccacgagcactgaagagggctctcccgctggcagcccaacgtcgacagaagaaggatcaccagcaggctcccccacatcaacagaggagggtacatcagaatctgctactcccgagagtggacccggtacctccactgagcccagcgaggggagtgcaccaggtgcctcgagcagggctcagagtggcagtgtccctcagttcaagaaagttgttttccaggaatttactgatggctcctttactcagcccttataccgtggagaactaaatgaacatttgggactcctggggccatatataagagcagaagttgaagataatatcatggtaactttcagaaatcaggcctctcgtccctattccttctattctagccttatttcttatgaggaagatcagaggcaaggagcagaacctagaaaaaactttgtcaagcctaatgaaaccaaaacttacttttggaaagtgcaacatcatatggcacccactaaagatgagtttgactgcaaagcctgggcttatttctctgatgttgacctggaaaaagatgtgcactcaggcctgattggaccccttctggtctgccacactaacacactgaaccctgctcatgggagacaagtgacagtacaggaatttgctctgtttttcaccatctttgatgagaccaaaagctggtacttcactgaaaatatggaaagaaactgcagggctccctgcaatatccagatggaagatcccacttttaaagagaattatcgcttccatgcaatcaatggctacataatggatacactacctggcttagtaatggctcaggatcaaaggattcgatggtatctgctcagcatgggcagcaatgaaaacatccattctattcatttcagtggacatgtgttcactgtacgaaaaaaagaggagtataaaatggcactgtacaatctctatccaggtgtttttgagacagtggaaatgttaccatccaaagctggaatttggcgggtggaatgccttattggcgagcatctacatgctgggatgagcacactttttctggtgtacagcaataagtgtcagactcccctgggaatggcttctggacacattagagattttcagattacagcttcaggacaatatggacagtgggccccaaagctggccagacttcattattccggatcaatcaatgcctggagcaccaaggagcccttttcttggatcaaggtggatctgttggcaccaatgattattcacggcatcaagacccagggtgcccgtcagaagttctccagcctctacatctctcagtttatcatcatgtatagtcttgatgggaagaagtggcagacttatcgaggaaattccactggaaccttaatggtcttctttggcaatgtggattcatctgggataaaacacaatatttttaaccctccaattattgctcgatacatccgtttgcacccaactcattatagcattcgcagcactcttcgcatggagttgatgggctgtgatttaaatagttgcagcatgccattgggaatggagagtaaagcaatatcagatgcacagattactgcttcatcctactttaccaatatgtttgccacctggtctccttcaaaagctcgacttcacctccaagggaggagtaatgcctggagacctcaggtgaataatccaaaagagtggctgcaagtggacttccagaagacaatgaaagtcacaggagtaactactcagggagtaaaatctctgcttaccagcatgtatgtgaaggagttcctcatctccagcagtcaagatggccatcagtggactctcttttttcagaatggcaaagtaaaggtttttcagggaaatcaagactccttcacacctgtggtgaactctctagacccaccgttactgactcgctaccttcgaattcacccccagagttgggtgcaccagattgccctgaggatggaggttctgggctgcgaggcacaggacctctacggcgcgccaggtacctcagagtctgctacccccgagtcagggccaggatcagagccagccacctccgggtctgagacacccgggacttccgagagtgccacccctgagtccggacccgggtccgagcccgccacttccggctccgaaactcccggcacaagcgagagcgctaccccagagtcaggaccaggaacatctacagagccctctgaaggctccgctccagggtccccagccggcagtcccactagcaccgaggagggaacctctgaaagcgccacacccgaatcagggccagggtctgagcctgctaccagcggcagcgagacaccaggcacctctgagtccgccacaccagagtccggacccggatctcccgctgggagccccacctccactgaggagggatctcctgctggctctccaacatctactgaggaaggtacctcaaccgagccatccgagggatcagctcccggcacctcagagtcggcaaccccggagtctggacccggaacttccgaaagtgccacaccagagtccggtcccgggacttcagaatcagcaacacccgagtccggccctgggtctgaacccgccacaagtggtagtgagacaccaggatcagaacctgctacctcagggtcagagacacccggatctccggcaggctcaccaacctccactgaggagggcaccagcacagaaccaagcgagggctccgcacccggaacaagcactgaacccagtgagggttcagcacccggctctgagccggccacaagtggcagtgagacacccggcacttcagagagtgccacccccgagagtggcccaggcactagtaccgagccctctgaaggcagtgcgccagcctcgagcgaacaaaaactcatctcagaagaggatctgtcacctgcaaccggtcatcatcaccatcaccattga

SEQ ID NO: 1383 - protein, 2053 aa, synthetic construct
  REGION 1..2053: note = Description of Artificial Sequence: Synthetic polypeptide
ATRRYYLGAVELSWDYMQSDLGELPVDARFPPRVPKSFPFNTSVVYKKTLFVEFTDHLFNIAKPRPPWMGLLGPTIQAEVYDTVVITLKNMASHPVSLHAVGVSYWKASEGAEYDDQTSQREKEDDKVFPGGSHTYVWQVLKENGPMASDPLCLTYSYLSHVDLVKDLNSGLIGALLVCREGSLAKEKTQTLHKFILLFAVFDEGKSWHSETKNSLMQDRDAASARAWPKMHTVNGYVNRSLPGLIGCHRKSVYWHVIGMGTTPEVHSIFLEGHTFLVRNHRQASLEISPITFLTAQTLLMDLGQFLLFCHISSHQHDGMEAYVKVDSCPEEPQLRMKNNEEAEDYDDDLTDSEMDVVRFDDDNSPSFIQIRSVAKKHPKTWVHYIAAEEEDWDYAPLVLAPDDRSYKSQYLNNGPQRIGRKYKKVRFMAYTDETFKTREAIQHESGILGPLLYGEVGDTLLIIFKNQASRPYNIYPHGITDVRPLYSRRLPKGVKHLKDFPILPGEIFKYKWTVTVEDGPTKSDPRCLTRYYSSFVNMERDLASGLIGPLLICYKESVDQRGNQIMSDKRNVILFSVFDENRSWYLTENIQRFLPNPAGVQLEDPEFQASNIMHSINGYVFDSLQLSVCLHEVAYWYILSIGAQTDFLSVFFSGYTFKHKMVYEDTLTLFPFSGETVFMSMENPGLWILGCHNSDFRNRGMTALLKVSSCDKNTGDYYEDSYEDISAYLLSKNNAIEPRSFSQNGAPSPAGSPTSTEEGTSESATPESGPGSEPATSGSETPGTSESATPESGPGTSTEPSEGSAPGTSTEPSEGSAPGTSTEPSEGSAPGTSTEPSEGSAPGTSTEPSEGSAPGTSTEPSEGSAPGSPAGSPTSTEEGTSTEPSEGSAPGASSPPVLKRHQAEITRTTLQSDQEEIDYDDTISVEMKKEDFDIYDEDENQSPRSFQKKTRHYFIAAVERLWDYGMSSSPHVLRNRAQSGSVPQFKKVVFQEFTDGSFTQPLYRGELNEHLGLLGPYIRAEVEDNIMVTFRNQASRPYSFYSSLISYEEDQRQGAEPRKNFVKPNETKTYFWKVQHHMAPTKDEFDCKAWAYFSDVDLEKDVHSGLIGPLLVCHTNTLNPAHGRQVTVQEFALFFTIFDETKSWYFTENMERNCRGAPSPAGSPTSTEEGTSESATPESGPGTSTEPSEGSAPGSPAGSPTSTEEGTSTEPSEGSAPGTSTEPSEGSAPGTSESATPESGPGSEPATSGSETPGSEPATSGSETPGSPAGSPTSTEEGTSESATPESGPGTSTEPSEGSAPGASSAPCNIQMEDPTFKENYRFHAINGYIMDTLPGLVMAQDQRIRWYLLSMGSNENIHSIHFSGHVFTVRKKEEYKMALYNLYPGVFETVEMLPSKAGIWRVECLIGEHLHAGMSTLFLVYSNKCQTPLGMASGHIRDFQITASGQYGQWAPKLARLHYSGSINAWSTKEPFSWIKVDLLAPMIIHGIKTQGARQKFSSLYISQFIIMYSLDGKKWQTYRGNSTGTLMVFFGNVDSSGIKHNIFNPPIIARYIRLHPTHYSIRSTLRMELMGCDLNSCSMPLGMESKAISDAQITASSYFTNMFATWSPSKARLHLQGRSNAWRPQVNNPKEWLQVDFQKTMKVTGVTTQGVKSLLTSMYVKEFLISSSQDGHQWTLFFQNGKVKVFQGNQDSFTPVVNSLDPPLLTRYLRIHPQSWVHQIALRMEVLGCEAQDLYGAPGTSESATPESGPGSEPATSGSETPGTSESATPESGPGSEPATSGSETPGTSESATPESGPGTSTEPSEGSAPGSPAGSPTSTEEGTSESATPESGPGSEPATSGSETPGTSESATPESGPGSPAGSPTSTEEGSPAGSPTSTEEGTSTEPSEGSAPGTSESATPESGPGTSESATPESGPGTSESATPESGPGSEPATSGSETPGSEPATSGSETPGSPAGSPTSTEEGTSTEPSEGSAPGTSTEPSEGSAPGSEPATSGSETPGTSESATPESGPGTSTEPSEGSAPASSEQKLISEEDLSPATGHHHHHH

SEQ ID NO: 1384 - DNA, 6162 bp, synthetic construct
  misc_feature 1..6162: note = Description of Artificial Sequence: Synthetic polynucleotide
  source 1..6162: mol_type = other DNA
gccaccagaagatactacctgggtgcagtggaactgtcatgggactatatgcaaagtgatctcggtgagctgcctgtggacgcaagatttcctcctagagtgccaaaatcttttccattcaacacctcagtcgtgtacaaaaagactctgtttgtagaattcacggatcaccttttcaacatcgctaagccaaggccaccctggatgggtctgctaggtcctaccatccaggctgaggtttatgatacagtggtcattacacttaagaacatggcttcccatcctgtcagtcttcatgctgttggtgtatcctactggaaagcttctgagggagctgaatatgatgatcagaccagtcaaagggagaaagaagatgataaagtcttccctggtggaagccatacatatgtctggcaggtcctgaaagagaatggtccaatggcctctgacccactgtgccttacctactcatatctttctcatgtggacctggtaaaagacttgaattcaggcctcattggagccctactagtatgtagagaagggagtctggccaaggaaaagacacagaccttgcacaaatttatactactttttgctgtatttgatgaagggaaaagttggcactcagaaacaaagaactccttgatgcaggatagggatgctgcatctgctcgggcctggcctaaaatgcacacagtcaatggttatgtaaacaggtctctgccaggtctgattggatgccacaggaaatcagtctattggcatgtgattggaatgggcaccactcctgaagtgcactcaatattcctcgaaggtcacacatttcttgtgaggaaccatcgccaggctagcttggaaatctcgccaataactttccttactgctcaaacactcttgatggaccttggacagtttctactgttttgtcatatctcttcccaccaacatgatggcatggaagcttatgtcaaagtagacagctgtccagaggaaccccaactacgaatgaaaaataatgaagaagcggaagactatgatgatgatcttactgattctgaaatggatgtggtcaggtttgatgatgacaactctccttcctttatccaaattcgctcagttgccaagaagcatcctaaaacttgggtacattacattgctgctgaagaggaggactgggactatgctcccttagtcctcgcccccgatgacagaagttataaaagtcaatatttgaacaatggccctcagcggattggtaggaagtacaaaaaagtccgatttatggcatacacagatgaaacctttaagactcgtgaagctattcagcatgaatcaggaatcttgggacctttactttatggggaagttggagacacactgttgattatatttaagaatcaagcaagcagaccatataacatctaccctcacggaatcactgatgtccgtcctttgtattcaaggagattaccaaaaggtgtaaaacatttgaaggattttccaattctgccaggagaaatattcaaatataaatggacagtgactgtagaagatgggccaactaaatcagatcctcggtgcctgacccgctattactctagtttcgttaatatggagagagatctagcttcaggactcattggccctctcctcatctgctacaaagaatctgtagatcaaagaggaaaccagataatgtcagacaagaggaatgtcatcctgttttctgtatttgatgagaaccgaagctggtacctcacagagaatatacaacgctttctccccaatccagctggagtgcagcttgaggatccagagttccaagcctccaacatcatgcacagcatcaatggctatgtttttgatagtttgcagttgtcagtttgtttgcatgaggtggcatactggtacattctaagcattggagcacagactgacttcctttctgtcttcttctctggatataccttcaaacacaaaatggtctatgaagacacactcaccctattcccattctcaggagaaactgtcttcatgtcgatggaaaacccaggtctatggattctggggtgccacaactcagactttcggaacagaggcatgaccgccttactgaaggtttctagttgtgacaagaacactggtgattattacgaggacagttatgaagatatttcagcatacttgctgagtaaaaacaatgccattgaaccaagaagcttctctcaaaacggcgcgccaagtcccgctggaagcccaactagcaccgaagaggggacctcagagtccgccacccccgagtccggccctggctctgagcctgccactagcggctccgagactcctggcacatccgaaagcgctacacccgagagtggacccggcacctctaccgagcccagtgagggctccgcccctggaacaagcaccgagcccagcgaaggcagcgccccagggacctccacagagcccagtgaaggcagtgctcctggcaccagcaccgaaccaagcgagggctctgcacccgggacctccaccgagccaagcgaaggctctgcccctggcacttccaccgagcccagcgaaggcagcgcccctgggagccccgctggctctcccaccagcactgaggagggcacatctaccgaaccaagtgaaggctctgcaccaggtgcctcgagcccaccagtcttgaaacgccatcaagctgaaataactcgtactactcttcagtcagatcaagaggaaatcgattatgatgataccatatcagttgaaatgaagaaggaagattttgacatttatgatgaggatgaaaatcagagcccccgcagctttcaaaagaaaacacgacactattttattgctgcagtggagaggctctgggattatgggatgagtagctccccacatgttctaagaaacagggctcagagtggcagtgtccctcagttcaagaaagttgttttccaggaatttactgatggctcctttactcagcccttataccgtggagaactaaatgaacatttgggactcctggggccatatataagagcagaagttgaagataatatcatggtaactttcagaaatcaggcctctcgtccctattccttctattctagccttatttcttatgaggaagatcagaggcaaggagcagaacctagaaaaaactttgtcaagcctaatgaaaccaaaacttacttttggaaagtgcaacatcatatggcacccactaaagatgagtttgactgcaaagcctgggcttatttctctgatgttgacctggaaaaagatgtgcactcaggcctgattggaccccttctggtctgccacactaacacactgaaccctgctcatgggagacaagtgacagtacaggaatttgctctgtttttcaccatctttgatgagaccaaaagctggtacttcactgaaaatatggaaagaaactgcaggggcgcgccatctccagccgggtccccaacttcgaccgaggaagggacctccgagtcagctaccccggagtccggtcctggcacctccaccgaaccatcggagggcagcgcccctgggagccctgccgggagccctacaagcaccgaagagggcaccagtacagagccaagtgaggggagcgcccctggtactagtactgaaccatccgaggggtcagctccaggcacgagtgagtccgctacccccgagagcggaccgggctcagagcccgccacgagtggcagtgaaactccaggctcagaacccgccactagtgggtcagagactccaggcagccctgccggatcccctacgtccaccgaggagggaacatctgagtccgcaacacccgaatccggtccaggcacctccacggaacctagtgaaggctcggcaccaggtgcctcgagcgctccctgcaatatccagatggaagatcccacttttaaagagaattatcgcttccatgcaatcaatggctacataatggatacactacctggcttagtaatggctcaggatcaaaggattcgatggtatctgctcagcatgggcagcaatgaaaacatccattctattcatttcagtggacatgtgttcactgtacgaaaaaaagaggagtataaaatggcactgtacaatctctatccaggtgtttttgagacagtggaaatgttaccatccaaagctggaatttggcgggtggaatgccttattggcgagcatctacatgctgggatgagcacactttttctggtgtacagcaataagtgtcagactcccctgggaatggcttctggacacattagagattttcagattacagcttcaggacaatatggacagtgggccccaaagctggccagacttcattattccggatcaatcaatgcctggagcaccaaggagcccttttcttggatcaaggtggatctgttggcaccaatgattattcacggcatcaagacccagggtgcccgtcagaagttctccagcctctacatctctcagtttatcatcatgtatagtcttgatgggaagaagtggcagacttatcgaggaaattccactggaaccttaatggtcttctttggcaatgtggattcatctgggataaaacacaatatttttaaccctccaattattgctcgatacatccgtttgcacccaactcattatagcattcgcagcactcttcgcatggagttgatgggctgtgatttaaatagttgcagcatgccattgggaatggagagtaaagcaatatcagatgcacagattactgcttcatcctactttaccaatatgtttgccacctggtctccttcaaaagctcgacttcacctccaagggaggagtaatgcctggagacctcaggtgaataatccaaaagagtggctgcaagtggacttccagaagacaatgaaagtcacaggagtaactactcagggagtaaaatctctgcttaccagcatgtatgtgaaggagttcctcatctccagcagtcaagatggccatcagtggactctcttttttcagaatggcaaagtaaaggtttttcagggaaatcaagactccttcacacctgtggtgaactctctagacccaccgttactgactcgctaccttcgaattcacccccagagttgggtgcaccagattgccctgaggatggaggttctgggctgcgaggcacaggacctctacggcgcgccaggtacctcagagtctgctacccccgagtcagggccaggatcagagccagccacctccgggtctgagacacccgggacttccgagagtgccacccctgagtccggacccgggtccgagcccgccacttccggctccgaaactcccggcacaagcgagagcgctaccccagagtcaggaccaggaacatctacagagccctctgaaggctccgctccagggtccccagccggcagtcccactagcaccgaggagggaacctctgaaagcgccacacccgaatcagggccagggtctgagcctgctaccagcggcagcgagacaccaggcacctctgagtccgccacaccagagtccggacccggatctcccgctgggagccccacctccactgaggagggatctcctgctggctctccaacatctactgaggaaggtacctcaaccgagccatccgagggatcagctcccggcacctcagagtcggcaaccccggagtctggacccggaacttccgaaagtgccacaccagagtccggtcccgggacttcagaatcagcaacacccgagtccggccctgggtctgaacccgccacaagtggtagtgagacaccaggatcagaacctgctacctcagggtcagagacacccggatctccggcaggctcaccaacctccactgaggagggcaccagcacagaaccaagcgagggctccgcacccggaacaagcactgaacccagtgagggttcagcacccggctctgagccggccacaagtggcagtgagacacccggcacttcagagagtgccacccccgagagtggcccaggcactagtaccgagccctctgaaggcagtgcgccagcctcgagcgaacaaaaactcatctcagaagaggatctgtcacctgcaaccggtcatcatcaccatcaccattga

SEQ ID NO: 1385 - protein, 2197 aa, synthetic construct
  REGION 1..2197: note = Description of Artificial Sequence: Synthetic polypeptide
ATRRYYLGAVELSWDYMQGAPGTPGSGTASSSPGSSTPSGATGSPGSSTPSGATGSPGSSTPSGATGSPGSSPSASTGTGPGASPGTSSTGSPGASPGTSSTGSPGTPGSGTASSSPGASPGTSSTGSPGASPGTSSTGSPGASPGTSSTGSPGASPGTSSTGSPGTPGSGTASSSPGSSTPSGATGSPGTPGSGTASSSPGSSTPSGATGSPGTPGSGTASSSPGSSTPSGATGSPGSSTPSGATGSPGSSPSASTGTGPGSSPSASTGTGPGASPGTSSTGSPGTPGSGTASSSPGSSTPSGATGSPASSSDLGELPVDARFPPRVPKSFPFNTSVVYKKTLFVEFTDHLFNIAKPRPPWMGLLGPTIQAEVYDTVVITLKNMASHPVSLHAVGVSYWKASEGAEYDDQTSQREKEDDKVFPGGSHTYVWQVLKENGPMASDPLCLTYSYLSHVDLVKDLNSGLIGALLVCREGSLAKEKTQTLHKFILLFAVFDEGKSWHSETKNSLMQDRDAASARAWPKMHTVNGYVNRSLPGLIGCHRKSVYWHVIGMGTTPEVHSIFLEGHTFLVRNHRQASLEISPITFLTAQTLLMDLGQFLLFCHISSHQHDGMEAYVKVDSCPEEPQLRMKNNEEAEDYDDDLTDSEMDVVRFDDDNSPSFIQIRSVAKKHPKTWVHYIAAEEEDWDYAPLVLAPDDRSYKSQYLNNGPQRIGRKYKKVRFMAYTDETFKTREAIQHESGILGPLLYGEVGDTLLIIFKNQASRPYNIYPHGITDVRPLYSRRLPKGVKHLKDFPILPGEIFKYKWTVTVEDGPTKSDPRCLTRYYSSFVNMERDLASGLIGPLLICYKESVDQRGNQIMSDKRNVILFSVFDENRSWYLTENIQRFLPNPAGVQLEDPEFQASNIMHSINGYVFDSLQLSVCLHEVAYWYILSIGAQTDFLSVFFSGYTFKHKMVYEDTLTLFPFSGETVFMSMENPGLWILGCHNSDFRNRGMTALLKVSSCDKNTGDYYEDSYEDISAYLLSKNNAIEPRSFSQNGAPSPAGSPTSTEEGTSESATPESGPGSEPATSGSETPGTSESATPESGPGTSTEPSEGSAPGTSTEPSEGSAPGTSTEPSEGSAPGTSTEPSEGSAPGTSTEPSEGSAPGTSTEPSEGSAPGSPAGSPTSTEEGTSTEPSEGSAPGASSPPVLKRHQAEITRTTLQSDQEEIDYDDTISVEMKKEDFDIYDEDENQSPRSFQKKTRHYFIAAVERLWDYGMSSSPHVLRNRAQSGSVPQFKKVVFQEFTDGSFTQPLYRGELNEHLGLLGPYIRAEVEDNIMVTFRNQASRPYSFYSSLISYEEDQRQGAEPRKNFVKPNETKTYFWKVQHHMAPTKDEFDCKAWAYFSDVDLEKDVHSGLIGPLLVCHTNTLNPAHGRQVTVQEFALFFTIFDETKSWYFTENMERNCRAPCNIQMEDPTFKENYRFHAINGYIMDTLPGLVMAQDQRIRWYLLSMGSNENIHSIHFSGHVFTVRKKEEYKMALYNLYPGVFETVEMLPSKAGIWRVECLIGEHLHAGMSTLFLVYSNKCQTPLGMASGHIRDFQITASGQYGQWAPKLARLHYSGSINAWSTKEPFSWIKVDLLAPMIIHGIKTQGARQKFSSLYISQFIIMYSLDGKKWQTYRGNSTGTLMVFFGNVDSSGIKHNIFNPPIIARYIRLHPTHYSIRSTLRMELMGCDLNSCSMPLGMESKAISDAQITASSYFTNMFATWSPSKARLHLQGRSNAWRPQVNNPKEWLQVDFQKTMKVTGVTTQGVKSLLTSMYVKEFLISSSQDGHQWTLFFQNGKVKVFQGNQDSFTPVVNSLDPPLLTRYLRIHPQSWVHQIALRMEVLGCEAQDLYGAPGTSESATPESGPGSEPATSGSETPGTSESATPESGPGSEPATSGSETPGTSESATPESGPGTSTEPSEGSAPGSPAGSPTSTEEGTSESATPESGPGSEPATSGSETPGTSESATPESGPGSPAGSPTSTEEGSPAGSPTSTEEGTSTEPSEGSAPGTSESATPESGPGTSESATPESGPGTSESATPESGPGSEPATSGSETPGSEPATSGSETPGSPAGSPTSTEEGTSTEPSEGSAPGTSTEPSEGSAPGSEPATSGSETPGTSESATPESGPGTSTEPSEGSAPASSEQKLISEEDLSPATGHHHHHH

SEQ ID NO: 1386 - DNA, 6594 bp, synthetic construct
  misc_feature 1..6594: note = Description of Artificial Sequence: Synthetic polynucleotide
  source 1..6594: mol_type = other DNA
gccaccagaagatactacctgggtgcagtggaactgtcatgggactatatgcaaggcgcgccaggtacgcccgggtcgggaacagcgtcctcaagcccgggtagctcgacgccgtcaggagccacagggtcgccgggatcgtcgactccatcaggcgcaacgggatcgcctggatcaagcactccatccggagcgacgggaagcccagggagctccccgtccgcatcgactgggacgggacctggagcaagccccggtacgtcgtcaacaggttcgcctggtgcctcgcctggcacgtccagcacggggagccccggaacgccgggttccggaaccgcatcctcctcaccaggtgcctcaccgggcacctcatcaacgggatcaccaggggcttcaccgggaacgagctcgacgggttcaccgggagcgtccccggggacttcgtcgacaggtagcccaggggcaagccccggtacatcgtcaacgggttccccagggacaccggggagcggtactgcatcgtcctcacccggttcctcgacacccagcggagccacgggttcgcccggtactccggggtccggaacggccagcagctcacccggttcctcgacgccatcaggtgccacgggctcgcctggaacgccaggctcgggcactgcgagcagcagccctggatcatcaacgcctagcggagcgaccggctcccctggatcgtcaactccctcgggcgcgactgggagcccaggaagctcaccgtcggcctcgacgggaacagggcctggttcgagcccctcagcttcaacaggaacaggtccaggcgcgtcgccaggtacatcatcgacgggttcgcctgggacccctgggtccggtactgcctcatcatcgcccggatcgtccaccccctcgggagcgacaggttcgcctgcctcgagcagtgatctcggtgagctgcctgtggacgcaagatttcctcctagagtgccaaaatcttttccattcaacacctcagtcgtgtacaaaaagactctgtttgtagaattcacggatcaccttttcaacatcgctaagccaaggccaccctggatgggtctgctaggtcctaccatccaggctgaggtttatgatacagtggtcattacacttaagaacatggcttcccatcctgtcagtcttcatgctgttggtgtatcctactggaaagcttctgagggagctgaatatgatgatcagaccagtcaaagggagaaagaagatgataaagtcttccctggtggaagccatacatatgtctggcaggtcctgaaagagaatggtccaatggcctctgacccactgtgccttacctactcatatctttctcatgtggacctggtaaaagacttgaattcaggcctcattggagccctactagtatgtagagaagggagtctggccaaggaaaagacacagaccttgcacaaatttatactactttttgctgtatttgatgaagggaaaagttggcactcagaaacaaagaactccttgatgcaggatagggatgctgcatctgctcgggcctggcctaaaatgcacacagtcaatggttatgtaaacaggtctctgccaggtctgattggatgccacaggaaatcagtctattggcatgtgattggaatgggcaccactcctgaagtgcactcaatattcctcgaaggtcacacatttcttgtgaggaaccatcgccaggctagcttggaaatctcgccaataactttccttactgctcaaacactcttgatggaccttggacagtttctactgttttgtcatatctcttcccaccaacatgatggcatggaagcttatgtcaaagtagacagctgtccagaggaaccccaactacgaatgaaaaataatgaagaagcggaagactatgatgatgatcttactgattctgaaatggatgtggtcaggtttgatgatgacaactctccttcctttatccaaattcgctcagttgccaagaagcatcctaaaacttgggtacattacattgctgctgaagaggaggactgggactatgctcccttagtcctcgcccccgatgacagaagttataaaagtcaatatttgaacaatggccctcagcggattggtaggaagtacaaaaaagtccgatttatggcatacacagatgaaacctttaagactcgtgaagctattcagcatgaatcaggaatcttgggacctttactttatggggaagttggagacacactgttgattatatttaagaatcaagcaagcagaccatataacatctaccctcacggaatcactgatgtccgtcctttgtattcaaggagattaccaaaaggtgtaaaacatttgaaggattttccaattctgccaggagaaatattcaaatataaatggacagtgactgtagaagatgggccaactaaatcagatcctcggtgcctgacccgctattactctagtttcgttaatatggagagagatctagcttcaggactcattggccctctcctcatctgctacaaagaatctgtagatcaaagaggaaaccagataatgtcagacaagaggaatgtcatcctgttttctgtatttgatgagaaccgaagctggtacctcacagagaatatacaacgctttctccccaatccagctggagtgcagcttgaggatccagagttccaagcctccaacatcatgcacagcatcaatggctatgtttttgatagtttgcagttgtcagtttgtttgcatgaggtggcatactggtacattctaagcattggagcacagactgacttcctttctgtcttcttctctggatataccttcaaacacaaaatggtctatgaagacacactcaccctattcccattctcaggagaaactgtcttcatgtcgatggaaaacccaggtctatggattctggggtgccacaactcagactttcggaacagaggcatgaccgccttactgaaggtttctagttgtgacaagaacactggtgattattacgaggacagttatgaagatatttcagcatacttgctgagtaaaaacaatgccattgaaccaagaagcttctctcaaaacggcgcgccaagtcccgctggaagcccaactagcaccgaagaggggacctcagagtccgccacccccgagtccggccctggctctgagcctgccactagcggctccgagactcctggcacatccgaaagcgctacacccgagagtggacccggcacctctaccgagcccagtgagggctccgcccctggaacaagcaccgagcccagcgaaggcagcgccccagggacctccacagagcccagtgaaggcagtgctcctggcaccagcaccgaaccaagcgagggctctgcacccgggacctccaccgagccaagcgaaggctctgcccctggcacttccaccgagcccagcgaaggcagcgcccctgggagccccgctggctctcccaccagcactgaggagggcacatctaccgaaccaagtgaaggctctgcaccaggtgcctcgagcccaccagtcttgaaacgccatcaagctgaaataactcgtactactcttcagtcagatcaagaggaaatcgattatgatgataccatatcagttgaaatgaagaaggaagattttgacatttatgatgaggatgaaaatcagagcccccgcagctttcaaaagaaaacacgacactattttattgctgcagtggagaggctctgggattatgggatgagtagctccccacatgttctaagaaacagggctcagagtggcagtgtccctcagttcaagaaagttgttttccaggaatttactgatggctcctttactcagcccttataccgtggagaactaaatgaacatttgggactcctggggccatatataagagcagaagttgaagataatatcatggtaactttcagaaatcaggcctctcgtccctattccttctattctagccttatttcttatgaggaagatcagaggcaaggagcagaacctagaaaaaactttgtcaagcctaatgaaaccaaaacttacttttggaaagtgcaacatcatatggcacccactaaagatgagtttgactgcaaagcctgggcttatttctctgatgttgacctggaaaaagatgtgcactcaggcctgattggaccccttctggtctgccacactaacacactgaaccctgctcatgggagacaagtgacagtacaggaatttgctctgtttttcaccatctttgatgagaccaaaagctggtacttcactgaaaatatggaaagaaactgcagggctccctgcaatatccagatggaagatcccacttttaaagagaattatcgcttccatgcaatcaatggctacataatggatacactacctggcttagtaatggctcaggatcaaaggattcgatggtatctgctcagcatgggcagcaatgaaaacatccattctattcatttcagtggacatgtgttcactgtacgaaaaaaagaggagtataaaatggcactgtacaatctctatccaggtgtttttgagacagtggaaatgttaccatccaaagctggaatttggcgggtggaatgccttattggcgagcatctacatgctgggatgagcacactttttctggtgtacagcaataagtgtcagactcccctgggaatggcttctggacacattagagattttcagattacagcttcaggacaatatggacagtgggccccaaagctggccagacttcattattccggatcaatcaatgcctggagcaccaaggagcccttttcttggatcaaggtggatctgttggcaccaatgattattcacggcatcaagacccagggtgcccgtcagaagttctccagcctctacatctctcagtttatcatcatgtatagtcttgatgggaagaagtggcagacttatcgaggaaattccactggaaccttaatggtcttctttggcaatgtggattcatctgggataaaacacaatatttttaaccctccaattattgctcgatacatccgtttgcacccaactcattatagcattcgcagcactcttcgcatggagttgatgggctgtgatttaaatagttgcagcatgccattgggaatggagagtaaagcaatatcagatgcacagattactgcttcatcctactttaccaatatgtttgccacctggtctccttcaaaagctcgacttcacctccaagggaggagtaatgcctggagacctcaggtgaataatccaaaagagtggctgcaagtggacttccagaagacaatgaaagtcacaggagtaactactcagggagtaaaatctctgcttaccagcatgtatgtgaaggagttcctcatctccagcagtcaagatggccatcagtggactctcttttttcagaatggcaaagtaaaggtttttcagggaaatcaagactccttcacacctgtggtgaactctctagacccaccgttactgactcgctaccttcgaattcacccccagagttgggtgcaccagattgccctgaggatggaggttctgggctgcgaggcacaggacctctacggcgcgccaggtacctcagagtctgctacccccgagtcagggccaggatcagagccagccacctccgggtctgagacacccgggacttccgagagtgccacccctgagtccggacccgggtccgagcccgccacttccggctccgaaactcccggcacaagcgagagcgctaccccagagtcaggaccaggaacatctacagagccctctgaaggctccgctccagggtccccagccggcagtcccactagcaccgaggagggaacctctgaaagcgccacacccgaatcagggccagggtctgagcctgctaccagcggcagcgagacaccaggcacctctgagtccgccacaccagagtccggacccggatctcccgctgggagccccacctccactgaggagggatctcctgctggctctccaacatctactgaggaaggtacctcaaccgagccatccgagggatcagctcccggcacctcagagtcggcaaccccggagtctggacccggaacttccgaaagtgccacaccagagtccggtcccgggacttcagaatcagcaacacccgagtccggccctgggtctgaacccgccacaagtggtagtgagacaccaggatcagaacctgctacctcagggtcagagacacccggatctccggcaggctcaccaacctccactgaggagggcaccagcacagaaccaagcgagggctccgcacccggaacaagcactgaacccagtgagggttcagcacccggctctgagccggccacaagtggcagtgagacacccggcacttcagagagtgccacccccgagagtggcccaggcactagtaccgagccctctgaaggcagtgcgccagcctcgagcgaacaaaaactcatctcagaagaggatctgtcacctgcaaccggtcatcatcaccatcaccattga

SEQ ID NO: 1387 - protein, 2197 aa, synthetic construct
  REGION 1..2197: note = Description of Artificial Sequence: Synthetic polypeptide
ATRRYYLGAVELSWDYMQSDLGELPVDARFPPRVPKSFPFNTSVVYKKTLFVEFTDHLFNIAKPRPPWMGLLGPTIQAEVYDTVVITLKNMASHPVSLHAVGVSYWKASEGAEYDDQTSQREKEDDKVFPGGSHTYVWQVLKENGPMASDPLCLTYSYLSHVDLVKDLNSGLIGALLVCREGSLAKEKTQTLHKFILLFAVFDEGKSWHSETKNSLMQDRDAASARAWPKMHTVNGYVNRSLPGLIGCHRKSVYWHVIGMGTTPEVHSIFLEGHTFLVRNHRQASLEISPITFLTAQTLLMDLGQFLLFCHISSHQHDGMEAYVKVDSCPEEPQLRMKNNEEAEDYDDDLTDSEMDVVRFDDDNSPSFIQIRSVAKKHPKTWVHYIAAEEEDWDYAPLVLAPDGAPGTPGSGTASSSPGSSTPSGATGSPGSSTPSGATGSPGSSTPSGATGSPGSSPSASTGTGPGASPGTSSTGSPGASPGTSSTGSPGTPGSGTASSSPGASPGTSSTGSPGASPGTSSTGSPGASPGTSSTGSPGASPGTSSTGSPGTPGSGTASSSPGSSTPSGATGSPGTPGSGTASSSPGSSTPSGATGSPGTPGSGTASSSPGSSTPSGATGSPGSSTPSGATGSPGSSPSASTGTGPGSSPSASTGTGPGASPGTSSTGSPGTPGSGTASSSPGSSTPSGATGSPASSDRSYKSQYLNNGPQRIGRKYKKVRFMAYTDETFKTREAIQHESGILGPLLYGEVGDTLLIIFKNQASRPYNIYPHGITDVRPLYSRRLPKGVKHLKDFPILPGEIFKYKWTVTVEDGPTKSDPRCLTRYYSSFVNMERDLASGLIGPLLICYKESVDQRGNQIMSDKRNVILFSVFDENRSWYLTENIQRFLPNPAGVQLEDPEFQASNIMHSINGYVFDSLQLSVCLHEVAYWYILSIGAQTDFLSVFFSGYTFKHKMVYEDTLTLFPFSGETVFMSMENPGLWILGCHNSDFRNRGMTALLKVSSCDKNTGDYYEDSYEDISAYLLSKNNAIEPRSFSQNGAPSPAGSPTSTEEGTSESATPESGPGSEPATSGSETPGTSESATPESGPGTSTEPSEGSAPGTSTEPSEGSAPGTSTEPSEGSAPGTSTEPSEGSAPGTSTEPSEGSAPGTSTEPSEGSAPGSPAGSPTSTEEGTSTEPSEGSAPGASSPPVLKRHQAEITRTTLQSDQEEIDYDDTISVEMKKEDFDIYDEDENQSPRSFQKKTRHYFIAAVERLWDYGMSSSPHVLRNRAQSGSVPQFKKVVFQEFTDGSFTQPLYRGELNEHLGLLGPYIRAEVEDNIMVTFRNQASRPYSFYSSLISYEEDQRQGAEPRKNFVKPNETKTYFWKVQHHMAPTKDEFDCKAWAYFSDVDLEKDVHSGLIGPLLVCHTNTLNPAHGRQVTVQEFALFFTIFDETKSWYFTENMERNCRAPCNIQMEDPTFKENYRFHAINGYIMDTLPGLVMAQDQRIRWYLLSMGSNENIHSIHFSGHVFTVRKKEEYKMALYNLYPGVFETVEMLPSKAGIWRVECLIGEHLHAGMSTLFLVYSNKCQTPLGMASGHIRDFQITASGQYGQWAPKLARLHYSGSINAWSTKEPFSWIKVDLLAPMIIHGIKTQGARQKFSSLYISQFIIMYSLDGKKWQTYRGNSTGTLMVFFGNVDSSGIKHNIFNPPIIARYIRLHPTHYSIRSTLRMELMGCDLNSCSMPLGMESKAISDAQITASSYFTNMFATWSPSKARLHLQGRSNAWRPQVNNPKEWLQVDFQKTMKVTGVTTQGVKSLLTSMYVKEFLISSSQDGHQWTLFFQNGKVKVFQGNQDSFTPVVNSLDPPLLTRYLRIHPQSWVHQIALRMEVLGCEAQDLYGAPGTSESATPESGPGSEPATSGSETPGTSESATPESGPGSEPATSGSETPGTSESATPESGPGTSTEPSEGSAPGSPAGSPTSTEEGTSESATPESGPGSEPATSGSETPGTSESATPESGPGSPAGSPTSTEEGSPAGSPTSTEEGTSTEPSEGSAPGTSESATPESGPGTSESATPESGPGTSESATPESGPGSEPATSGSETPGSEPATSGSETPGSPAGSPTSTEEGTSTEPSEGSAPGTSTEPSEGSAPGSEPATSGSETPGTSESATPESGPGTSTEPSEGSAPASSEQKLISEEDLSPATGHHHHHH

SEQ ID NO: 1388 - DNA, 6594 bp, synthetic construct
  misc_feature 1..6594: note = Description of Artificial Sequence: Synthetic polynucleotide
  source 1..6594: mol_type = other DNA
gccaccagaagatactacctgggtgcagtggaactgtcatgggactatatgcaaagtgatctcggtgagctgcctgtggacgcaagatttcctcctagagtgccaaaatcttttccattcaacacctcagtcgtgtacaaaaagactctgtttgtagaattcacggatcaccttttcaacatcgctaagccaaggccaccctggatgggtctgctaggtcctaccatccaggctgaggtttatgatacagtggtcattacacttaagaacatggcttcccatcctgtcagtcttcatgctgttggtgtatcctactggaaagcttctgagggagctgaatatgatgatcagaccagtcaaagggagaaagaagatgataaagtcttccctggtggaagccatacatatgtctggcaggtcctgaaagagaatggtccaatggcctctgacccactgtgccttacctactcatatctttctcatgtggacctggtaaaagacttgaattcaggcctcattggagccctactagtatgtagagaagggagtctggccaaggaaaagacacagaccttgcacaaatttatactactttttgctgtatttgatgaagggaaaagttggcactcagaaacaaagaactccttgatgcaggatagggatgctgcatctgctcgggcctggcctaaaatgcacacagtcaatggttatgtaaacaggtctctgccaggtctgattggatgccacaggaaatcagtctattggcatgtgattggaatgggcaccactcctgaagtgcactcaatattcctcgaaggtcacacatttcttgtgaggaaccatcgccaggctagcttggaaatctcgccaataactttccttactgctcaaacactcttgatggaccttggacagtttctactgttttgtcatatctcttcccaccaacatgatggcatggaagcttatgtcaaagtagacagctgtccagaggaaccccaactacgaatgaaaaataatgaagaagcggaagactatgatgatgatcttactgattctgaaatggatgtggtcaggtttgatgatgacaactctccttcctttatccaaattcgctcagttgccaagaagcatcctaaaacttgggtacattacattgctgctgaagaggaggactgggactatgctcccttagtcctcgcccccgatggcgcgccaggtacgcccgggtcgggaacagcgtcctcaagcccgggtagctcgacgccgtcaggagccacagggtcgccgggatcgtcgactccatcaggcgcaacgggatcgcctggatcaagcactccatccggagcgacgggaagcccagggagctccccgtccgcatcgactgggacgggacctggagcaagccccggtacgtcgtcaacaggttcgcctggtgcctcgcctggcacgtccagcacggggagccccggaacgccgggttccggaaccgcatcctcctcaccaggtgcctcaccgggcacctcatcaacgggatcaccaggggcttcaccgggaacgagctcgacgggttcaccgggagcgtccccggggacttcgtcgacaggtagcccaggggcaagccccggtacatcgtcaacgggttccccagggacaccggggagcggtactgcatcgtcctcacccggttcctcgacacccagcggagccacgggttcgcccggtactccggggtccggaacggccagcagctcacccggttcctcgacgccatcaggtgccacgggctcgcctggaacgccaggctcgggcactgcgagcagcagccctggatcatcaacgcctagcggagcgaccggctcccctggatcgtcaactccctcgggcgcgactgggagcccaggaagctcaccgtcggcctcgacgggaacagggcctggttcgagcccctcagcttcaacaggaacaggtccaggcgcgtcgccaggtacatcatcgacgggttcgcctgggacccctgggtccggtactgcctcatcatcgcccggatcgtccaccccctcgggagcgacaggttcgcctgcctcgagcgacagaagttataaaagtcaatatttgaacaatggccctcagcggattggtaggaagtacaaaaaagtccgatttatggcatacacagatgaaacctttaagactcgtgaagctattcagcatgaatcaggaatcttgggacctttactttatggggaagttggagacacactgttgattatatttaagaatcaagcaagcagaccatataacatctaccctcacggaatcactgatgtccgtcctttgtattcaaggagattaccaaaaggtgtaaaacatttgaaggattttccaattctgccaggagaaatattcaaatataaatggacagtgactgtagaagatgggccaactaaatcagatcctcggtgcctgacccgctattactctagtttcgttaatatggagagagatctagcttcaggactcattggccctctcctcatctgctacaaagaatctgtagatcaaagaggaaaccagataatgtcagacaagaggaatgtcatcctgttttctgtatttgatgagaaccgaagctggtacctcacagagaatatacaacgctttctccccaatccagctggagtgcagcttgaggatccagagttccaagcctccaacatcatgcacagcatcaatggctatgtttttgatagtttgcagttgtcagtttgtttgcatgaggtggcatactggtacattctaagcattggagcacagactgacttcctttctgtcttcttctctggatataccttcaaacacaaaatggtctatgaagacacactcaccctattcccattctcaggagaaactgtcttcatgtcgatggaaaacccaggtctatggattctggggtgccacaactcagactttcggaacagaggcatgaccgccttactgaaggtttctagttgtgacaagaacactggtgattattacgaggacagttatgaagatatttcagcatacttgctgagtaaaaacaatgccattgaaccaagaagcttctctcaaaacggcgcgccaagtcccgctggaagcccaactagcaccgaagaggggacctcagagtccgccacccccgagtccggccctggctctgagcctgccactagcggctccgagactcctggcacatccgaaagcgctacacccgagagtggacccggcacctctaccgagcccagtgagggctccgcccctggaacaagcaccgagcccagcgaaggcagcgccccagggacctccacagagcccagtgaaggcagtgctcctggcaccagcaccgaaccaagcgagggctctgcacccgggacctccaccgagccaagcgaaggctctgcccctggcacttccaccgagcccagcgaaggcagcgcccctgggagccccgctggctctcccaccagcactgaggagggcacatctaccgaaccaagtgaaggctctgcaccaggtgcctcgagcccaccagtcttgaaacgccatcaagctgaaataactcgtactactcttcagtcagatcaagaggaaatcgattatgatgataccatatcagttgaaatgaagaaggaagattttgacatttatgatgaggatgaaaatcagagcccccgcagctttcaaaagaaaacacgacactattttattgctgcagtggagaggctctgggattatgggatgagtagctccccacatgttctaagaaacagggctcagagtggcagtgtccctcagttcaagaaagttgttttccaggaatttactgatggctcctttactcagcccttataccgtggagaactaaatgaacatttgggactcctggggccatatataagagcagaagttgaagataatatcatggtaactttcagaaatcaggcctctcgtccctattccttctattctagccttatttcttatgaggaagatcagaggcaaggagcagaacctagaaaaaactttgtcaagcctaatgaaaccaaaacttacttttggaaagtgcaacatcatatggcacccactaaagatgagtttgactgcaaagcctgggcttatttctctgatgttgacctggaaaaagatgtgcactcaggcctgattggaccccttctggtctgccacactaacacactgaaccctgctcatgggagacaagtgacagtacaggaatttgctctgtttttcaccatctttgatgagaccaaaagctggtacttcactgaaaatatggaaagaaactgcagggctccctgcaatatccagatggaagatcccacttttaaagagaattatcgcttccatgcaatcaatggctacataatggatacactacctggcttagtaatggctcaggatcaaaggattcgatggtatctgctcagcatgggcagcaatgaaaacatccattctattcatttcagtggacatgtgttcactgtacgaaaaaaagaggagtataaaatggcactgtacaatctctatccaggtgtttttgagacagtggaaatgttaccatccaaagctggaatttggcgggtggaatgccttattggcgagcatctacatgctgggatgagcacactttttctggtgtacagcaataagtgtcagactcccctgggaatggcttctggacacattagagattttcagattacagcttcaggacaatatggacagtgggccccaaagctggccagacttcattattccggatcaatcaatgcctggagcaccaaggagcccttttcttggatcaaggtggatctgttggcaccaatgattattcacggcatcaagacccagggtgcccgtcagaagttctccagcctctacatctctcagtttatcatcatgtatagtcttgatgggaagaagtggcagacttatcgaggaaattccactggaaccttaatggtcttctttggcaatgtggattcatctgggataaaacacaatatttttaaccctccaattattgctcgatacatccgtttgcacccaactcattatagcattcgcagcactcttcgcatggagttgatgggctgtgatttaaatagttgcagcatgccattgggaatggagagtaaagcaatatcagatgcacagattactgcttcatcctactttaccaatatgtttgccacctggtctccttcaaaagctcgacttcacctccaagggaggagtaatgcctggagacctcaggtgaataatccaaaagagtggctgcaagtggacttccagaagacaatgaaagtcacaggagtaactactcagggagtaaaatctctgcttaccagcatgtatgtgaaggagttcctcatctccagcagtcaagatggccatcagtggactctcttttttcagaatggcaaagtaaaggtttttcagggaaatcaagactccttcacacctgtggtgaactctctagacccaccgttactgactcgctaccttcgaattcacccccagagttgggtgcaccagattgccctgaggatggaggttctgggctgcgaggcacaggacctctacggcgcgccaggtacctcagagtctgctacccccgagtcagggccaggatcagagccagccacctccgggtctgagacacccgggacttccgagagtgccacccctgagtccggacccgggtccgagcccgccacttccggctccgaaactcccggcacaagcgagagcgctaccccagagtcaggaccaggaacatctacagagccctctgaaggctccgctccagggtccccagccggcagtcccactagcaccgaggagggaacctctgaaagcgccacacccgaatcagggccagggtctgagcctgctaccagcggcagcgagacaccaggcacctctgagtccgccacaccagagtccggacccggatctcccgctgggagccccacctccactgaggagggatctcctgctggctctccaacatctactgaggaaggtacctcaaccgagccatccgagggatcagctcccggcacctcagagtcggcaaccccggagtctggacccggaacttccgaaagtgccacaccagagtccggtcccgggacttcagaatcagcaacacccgagtccggccctgggtctgaacccgccacaagtggtagtgagacaccaggatcagaacctgctacctcagggtcagagacacccggatctccggcaggctcaccaacctccactgaggagggcaccagcacagaaccaagcgagggctccgcacccggaacaagcactgaacccagtgagggttcagcacccggctctgagccggccacaagtggcagtgagacacccggcacttcagagagtgccacccccgagagtggcccaggcactagtaccgagccctctgaaggcagtgcgccagcctcgagcgaacaaaaactcatctcagaagaggatctgtcacctgcaaccggtcatcatcaccatcaccattga

SEQ ID NO: 1389 - protein, 2200 aa, synthetic construct
  REGION 1..2200: note = Description of Artificial Sequence: Synthetic polypeptide
ATRRYYLGAVELSWDYMQSDLGELPVDARFPPRVPKSFPFNTSVVYKKTLFVEFTDHLFNIAKPRPPWMGLLGPTIQAEVYDTVVITLKNMASHPVSLHAVGVSYWKASEGAEYDDQTSQREKEDDKVFPGGSHTYVWQVLKENGPMASDPLCLTYSYLSHVDLVKDLNSGLIGALLVCREGSLAKEKTQTLHKFILLFAVFDEGKSWHSETKNSLMQDRDAASARAWPKMHTVNGYVNRSLPGLIGCHRKSVYWHVIGMGTTPEVHSIFLEGHTFLVRNHRQASLEISPITFLTAQTLLMDLGQFLLFCHISSHQHDGMEAYVKVDSCPEEPQLRMKNNEEAEDYDDDLTDSEMDVVRFDDDNSPSFIQIRSVAKKHPKTWVHYIAAEEEDWDYAPLVLAPDDRSYKSQYLNNGPQRIGRKYKKVRFMAYTDETFKTREAIQHESGILGPLLYGEVGDTLLIIFKNQASRPYNIYPHGITDVRPLYSRRLPKGVKHLKDFPILPGEIFKYKWTVTVEDGPTKSDPRCLTRYYSSFVNMERDLASGLIGPLLICYKESVDQRGNQIMSDKRNVILFSVFDENRSWYLTENIQRFLPNPAGVQLEDPEFQASNIMHSINGYVFDSLQLSVCLHEVAYWYILSIGAQTDFLSVFFSGYTFKHKMVYEDTLTLFPFSGETVFMSMENPGLWILGCHNSDFRNRGMTALLKVSSCDKNTGDYYEDSYEDISAYLLSKNNAIEPRSFSQNGAPSPAGSPTSTEEGTSESATPESGPGSEPATSGSETPGTSESATPESGPGTSTEPSEGSAPGTSTEPSEGSAPGTSTEPSEGSAPGTSTEPSEGSAPGTSTEPSEGSAPGTSTEPSEGSAPGSPAGSPTSTEEGTSTEPSEGSAPGASSPPVLKRHQAEITRTTLQSDQEEIDYDDTISVEMKKEDFDIYDEDENQSPRSFQKKTRHYFIAAVERLWDYGMSSSPHVLRNRAQGAPGTPGSGTASSSPGSSTPSGATGSPGSSTPSGATGSPGSSTPSGATGSPGSSPSASTGTGPGASPGTSSTGSPGASPGTSSTGSPGTPGSGTASSSPGASPGTSSTGSPGASPGTSSTGSPGASPGTSSTGSPGASPGTSSTGSPGTPGSGTASSSPGSSTPSGATGSPGTPGSGTASSSPGSSTPSGATGSPGTPGSGTASSSPGSSTPSGATGSPGSSTPSGATGSPGSSPSASTGTGPGSSPSASTGTGPGASPGTSSTGSPGTPGSGTASSSPGSSTPSGATGSPASSRAQSGSVPQFKKVVFQEFTDGSFTQPLYRGELNEHLGLLGPYIRAEVEDNIMVTFRNQASRPYSFYSSLISYEEDQRQGAEPRKNFVKPNETKTYFWKVQHHMAPTKDEFDCKAWAYFSDVDLEKDVHSGLIGPLLVCHTNTLNPAHGRQVTVQEFALFFTIFDETKSWYFTENMERNCRAPCNIQMEDPTFKENYRFHAINGYIMDTLPGLVMAQDQRIRWYLLSMGSNENIHSIHFSGHVFTVRKKEEYKMALYNLYPGVFETVEMLPSKAGIWRVECLIGEHLHAGMSTLFLVYSNKCQTPLGMASGHIRDFQITASGQYGQWAPKLARLHYSGSINAWSTKEPFSWIKVDLLAPMIIHGIKTQGARQKFSSLYISQFIIMYSLDGKKWQTYRGNSTGTLMVFFGNVDSSGIKHNIFNPPIIARYIRLHPTHYSIRSTLRMELMGCDLNSCSMPLGMESKAISDAQITASSYFTNMFATWSPSKARLHLQGRSNAWRPQVNNPKEWLQVDFQKTMKVTGVTTQGVKSLLTSMYVKEFLISSSQDGHQWTLFFQNGKVKVFQGNQDSFTPVVNSLDPPLLTRYLRIHPQSWVHQIALRMEVLGCEAQDLYGAPGTSESATPESGPGSEPATSGSETPGTSESATPESGPGSEPATSGSETPGTSESATPESGPGTSTEPSEGSAPGSPAGSPTSTEEGTSESATPESGPGSEPATSGSETPGTSESATPESGPGSPAGSPTSTEEGSPAGSPTSTEEGTSTEPSEGSAPGTSESATPESGPGTSESATPESGPGTSESATPESGPGSEPATSGSETPGSEPATSGSETPGSPAGSPTSTEEGTSTEPSEGSAPGTSTEPSEGSAPGSEPATSGSETPGTSESATPESGPGTSTEPSEGSAPASSEQKLISEEDLSPATGHHHHHH

SEQ ID NO: 1390 - DNA, 6603 bp, synthetic construct
  misc_feature 1..6603: note = Description of Artificial Sequence: Synthetic polynucleotide
  source 1..6603: mol_type = other DNA
gccaccagaagatactacctgggtgcagtggaactgtcatgggactatatgcaaagtgatctcggtgagctgcctgtggacgcaagatttcctcctagagtgccaaaatcttttccattcaacacctcagtcgtgtacaaaaagactctgtttgtagaattcacggatcaccttttcaacatcgctaagccaaggccaccctggatgggtctgctaggtcctaccatccaggctgaggtttatgatacagtggtcattacacttaagaacatggcttcccatcctgtcagtcttcatgctgttggtgtatcctactggaaagcttctgagggagctgaatatgatgatcagaccagtcaaagggagaaagaagatgataaagtcttccctggtggaagccatacatatgtctggcaggtcctgaaagagaatggtccaatggcctctgacccactgtgccttacctactcatatctttctcatgtggacctggtaaaagacttgaattcaggcctcattggagccctactagtatgtagagaagggagtctggccaaggaaaagacacagaccttgcacaaatttatactactttttgctgtatttgatgaagggaaaagttggcactcagaaacaaagaactccttgatgcaggatagggatgctgcatctgctcgggcctggcctaaaatgcacacagtcaatggttatgtaaacaggtctctgccaggtctgattggatgccacaggaaatcagtctattggcatgtgattggaatgggcaccactcctgaagtgcactcaatattcctcgaaggtcacacatttcttgtgaggaaccatcgccaggctagcttggaaatctcgccaataactttccttactgctcaaacactcttgatggaccttggacagtttctactgttttgtcatatctcttcccaccaacatgatggcatggaagcttatgtcaaagtagacagctgtccagaggaaccccaactacgaatgaaaaataatgaagaagcggaagactatgatgatgatcttactgattctgaaatggatgtggtcaggtttgatgatgacaactctccttcctttatccaaattcgctcagttgccaagaagcatcctaaaacttgggtacattacattgctgctgaagaggaggactgggactatgctcccttagtcctcgcccccgatgacagaagttataaaagtcaatatttgaacaatggccctcagcggattggtaggaagtacaaaaaagtccgatttatggcatacacagatgaaacctttaagactcgtgaagctattcagcatgaatcaggaatcttgggacctttactttatggggaagttggagacacactgttgattatatttaagaatcaagcaagcagaccatataacatctaccctcacggaatcactgatgtccgtcctttgtattcaaggagattaccaaaaggtgtaaaacatttgaaggattttccaattctgccaggagaaatattcaaatataaatggacagtgactgtagaagatgggccaactaaatcagatcctcggtgcctgacccgctattactctagtttcgttaatatggagagagatctagcttcaggactcattggccctctcctcatctgctacaaagaatctgtagatcaaagaggaaaccagataatgtcagacaagaggaatgtcatcctgttttctgtatttgatgagaaccgaagctggtacctcacagagaatatacaacgctttctccccaatccagctggagtgcagcttgaggatccagagttccaagcctccaacatcatgcacagcatcaatggctatgtttttgatagtttgcagttgtcagtttgtttgcatgaggtggcatactggtacattctaagcattggagcacagactgacttcctttctgtcttcttctctggatataccttcaaacacaaaatggtctatgaagacacactcaccctattcccattctcaggagaaactgtcttcatgtcgatggaaaacccaggtctatggattctggggtgccacaactcagactttcggaacagaggcatgaccgccttactgaaggtttctagttgtgacaagaacactggtgattattacgaggacagttatgaagatatttcagcatacttgctgagtaaaaacaatgccattgaaccaagaagcttctctcaaaacggcgcgccaagtcccgctggaagcccaactagcaccgaagaggggacctcagagtccgccacccccgagtccggccctggctctgagcctgccactagcggctccgagactcctggcacatccgaaagcgctacacccgagagtggacccggcacctctaccgagcccagtgagggctccgcccctggaacaagcaccgagcccagcgaaggcagcgccccagggacctccacagagcccagtgaaggcagtgctcctggcaccagcaccgaaccaagcgagggctctgcacccgggacctccaccgagccaagcgaaggctctgcccctggcacttccaccgagcccagcgaaggcagcgcccctgggagccccgctggctctcccaccagcactgaggagggcacatctaccgaaccaagtgaaggctctgcaccaggtgcctcgagcccaccagtcttgaaacgccatcaagctgaaataactcgtactactcttcagtcagatcaagaggaaatcgattatgatgataccatatcagttgaaatgaagaaggaagattttgacatttatgatgaggatgaaaatcagagcccccgcagctttcaaaagaaaacacgacactattttattgctgcagtggagaggctctgggattatgggatgagtagctccccacatgttctaagaaacagggctcagggcgcgccaggtacgcccgggtcgggaacagcgtcctcaagcccgggtagctcgacgccgtcaggagccacagggtcgccgggatcgtcgactccatcaggcgcaacgggatcgcctggatcaagcactccatccggagcgacgggaagcccagggagctccccgtccgcatcgactgggacgggacctggagcaagccccggtacgtcgtcaacaggttcgcctggtgcctcgcctggcacgtccagcacggggagccccggaacgccgggttccggaaccgcatcctcctcaccaggtgcctcaccgggcacctcatcaacgggatcaccaggggcttcaccgggaacgagctcgacgggttcaccgggagcgtccccggggacttcgtcgacaggtagcccaggggcaagccccggtacatcgtcaacgggttccccagggacaccggggagcggtactgcatcgtcctcacccggttcctcgacacccagcggagccacgggttcgcccggtactccggggtccggaacggccagcagctcacccggttcctcgacgccatcaggtgccacgggctcgcctggaacgccaggctcgggcactgcgagcagcagccctggatcatcaacgcctagcggagcgaccggctcccctggatcgtcaactccctcgggcgcgactgggagcccaggaagctcaccgtcggcctcgacgggaacagggcctggttcgagcccctcagcttcaacaggaacaggtccaggcgcgtcgccaggtacatcatcgacgggttcgcctgggacccctgggtccggtactgcctcatcatcgcccggatcgtccaccccctcgggagcgacaggttcgcctgcctcgagcagggctcagagtggcagtgtccctcagttcaagaaagttgttttccaggaatttactgatggctcctttactcagcccttataccgtggagaactaaatgaacatttgggactcctggggccatatataagagcagaagttgaagataatatcatggtaactttcagaaatcaggcctctcgtccctattccttctattctagccttatttcttatgaggaagatcagaggcaaggagcagaacctagaaaaaactttgtcaagcctaatgaaaccaaaacttacttttggaaagtgcaacatcatatggcacccactaaagatgagtttgactgcaaagcctgggcttatttctctgatgttgacctggaaaaagatgtgcactcaggcctgattggaccccttctggtctgccacactaacacactgaaccctgctcatgggagacaagtgacagtacaggaatttgctctgtttttcaccatctttgatgagaccaaaagctggtacttcactgaaaatatggaaagaaactgcagggctccctgcaatatccagatggaagatcccacttttaaagagaattatcgcttccatgcaatcaatggctacataatggatacactacctggcttagtaatggctcaggatcaaaggattcgatggtatctgctcagcatgggcagcaatgaaaacatccattctattcatttcagtggacatgtgttcactgtacgaaaaaaagaggagtataaaatggcactgtacaatctctatccaggtgtttttgagacagtggaaatgttaccatccaaagctggaatttggcgggtggaatgccttattggcgagcatctacatgctgggatgagcacactttttctggtgtacagcaataagtgtcagactcccctgggaatggcttctggacacattagagattttcagattacagcttcaggacaatatggacagtgggccccaaagctggccagacttcattattccggatcaatcaatgcctggagcaccaaggagcccttttcttggatcaaggtggatctgttggcaccaatgattattcacggcatcaagacccagggtgcccgtcagaagttctccagcctctacatctctcagtttatcatcatgtatagtcttgatgggaagaagtggcagacttatcgaggaaattccactggaaccttaatggtcttctttggcaatgtggattcatctgggataaaacacaatatttttaaccctccaattattgctcgatacatccgtttgcacccaactcattatagcattcgcagcactcttcgcatggagttgatgggctgtgatttaaatagttgcagcatgccattgggaatggagagtaaagcaatatcagatgcacagattactgcttcatcctactttaccaatatgtttgccacctggtctccttcaaaagctcgacttcacctccaagggaggagtaatgcctggagacctcaggtgaataatccaaaagagtggctgcaagtggacttccagaagacaatgaaagtcacaggagtaactactcagggagtaaaatctctgcttaccagcatgtatgtgaaggagttcctcatctccagcagtcaagatggccatcagtggactctcttttttcagaatggcaaagtaaaggtttttcagggaaatcaagactccttcacacctgtggtgaactctctagacccaccgttactgactcgctaccttcgaattcacccccagagttgggtgcaccagattgccctgaggatggaggttctgggctgcgaggcacaggacctctacggcgcgccaggtacctcagagtctgctacccccgagtcagggccaggatcagagccagccacctccgggtctgagacacccgggacttccgagagtgccacccctgagtccggacccgggtccgagcccgccacttccggctccgaaactcccggcacaagcgagagcgctaccccagagtcaggaccaggaacatctacagagccctctgaaggctccgctccagggtccccagccggcagtcccactagcaccgaggagggaacctctgaaagcgccacacccgaatcagggccagggtctgagcctgctaccagcggcagcgagacaccaggcacctctgagtccgccacaccagagtccggacccggatctcccgctgggagccccacctccactgaggagggatctcctgctggctctccaacatctactgaggaaggtacctcaaccgagccatccgagggatcagctcccggcacctcagagtcggcaaccccggagtctggacccggaacttccgaaagtgccacaccagagtccggtcccgggacttcagaatcagcaacacccgagtccggccctgggtctgaacccgccacaagtggtagtgagacaccaggatcagaacctgctacctcagggtcagagacacccggatctccggcaggctcaccaacctccactgaggagggcaccagcacagaaccaagcgagggctccgcacccggaacaagcactgaacccagtgagggttcagcacccggctctgagccggccacaagtggcagtgagacacccggcacttcagagagtgccacccccgagagtggcccaggcactagtaccgagccctctgaaggcagtgcgccagcctcgagcgaacaaaaactcatctcagaagaggatctgtcacctgcaaccggtcatcatcaccatcaccattga

SEQ ID NO: 1391 - protein, 2197 aa, synthetic construct
  REGION 1..2197: note = Description of Artificial Sequence: Synthetic polypeptide
ATRRYYLGAVELSWDYMQSDLGELPVDARFPPRVPKSFPFNTSVVYKKTLFVEFTDHLFNIAKPRPPWMGLLGPTIQAEVYDTVVITLKNMASHPVSLHAVGVSYWKASEGAEYDDQTSQREKEDDKVFPGGSHTYVWQVLKENGPMASDPLCLTYSYLSHVDLVKDLNSGLIGALLVCREGSLAKEKTQTLHKFILLFAVFDEGKSWHSETKNSLMQDRDAASARAWPKMHTVNGYVNRSLPGLIGCHRKSVYWHVIGMGTTPEVHSIFLEGHTFLVRNHRQASLEISPITFLTAQTLLMDLGQFLLFCHISSHQHDGMEAYVKVDSCPEEPQLRMKNNEEAEDYDDDLTDSEMDVVRFDDDNSPSFIQIRSVAKKHPKTWVHYIAAEEEDWDYAPLVLAPDDRSYKSQYLNNGPQRIGRKYKKVRFMAYTDETFKTREAIQHESGILGPLLYGEVGDTLLIIFKNQASRPYNIYPHGITDVRPLYSRRLPKGVKHLKDFPILPGEIFKYKWTVTVEDGPTKSDPRCLTRYYSSFVNMERDLASGLIGPLLICYKESVDQRGNQIMSDKRNVILFSVFDENRSWYLTENIQRFLPNPAGVQLEDPEFQASNIMHSINGYVFDSLQLSVCLHEVAYWYILSIGAQTDFLSVFFSGYTFKHKMVYEDTLTLFPFSGETVFMSMENPGLWILGCHNSDFRNRGMTALLKVSSCDKNTGDYYEDSYEDISAYLLSKNNAIEPRSFSQNGAPSPAGSPTSTEEGTSESATPESGPGSEPATSGSETPGTSESATPESGPGTSTEPSEGSAPGTSTEPSEGSAPGTSTEPSEGSAPGTSTEPSEGSAPGTSTEPSEGSAPGTSTEPSEGSAPGSPAGSPTSTEEGTSTEPSEGSAPGASSPPVLKRHQAEITRTTLQSDQEEIDYDDTISVEMKKEDFDIYDEDENQSPRSFQKKTRHYFIAAVERLWDYGMSSSPHVLRNRAQSGSVPQFKKVVFQEFTDGSFTQPLYRGELNEHLGLLGPYIRAEVEDNIMVTFRNQASRPYSFYSSLISYEEDQRQGAEPRKNFVKPNETKTYFWKVQHHMAPTKDEFDCKAWAYFSDVDLEKDVHSGLIGPLLVCHTNTLNPAHGRQVTVQEFALFFTIFDETKSWYFTENMERNCRGAPGTPGSGTASSSPGSSTPSGATGSPGSSTPSGATGSPGSSTPSGATGSPGSSPSASTGTGPGASPGTSSTGSPGASPGTSSTGSPGTPGSGTASSSPGASPGTSSTGSPGASPGTSSTGSPGASPGTSSTGSPGASPGTSSTGSPGTPGSGTASSSPGSSTPSGATGSPGTPGSGTASSSPGSSTPSGATGSPGTPGSGTASSSPGSSTPSGATGSPGSSTPSGATGSPGSSPSASTGTGPGSSPSASTGTGPGASPGTSSTGSPGTPGSGTASSSPGSSTPSGATGSPASSAPCNIQMEDPTFKENYRFHAINGYIMDTLPGLVMAQDQRIRWYLLSMGSNENIHSIHFSGHVFTVRKKEEYKMALYNLYPGVFETVEMLPSKAGIWRVECLIGEHLHAGMSTLFLVYSNKCQTPLGMASGHIRDFQITASGQYGQWAPKLARLHYSGSINAWSTKEPFSWIKVDLLAPMIIHGIKTQGARQKFSSLYISQFIIMYSLDGKKWQTYRGNSTGTLMVFFGNVDSSGIKHNIFNPPIIARYIRLHPTHYSIRSTLRMELMGCDLNSCSMPLGMESKAISDAQITASSYFTNMFATWSPSKARLHLQGRSNAWRPQVNNPKEWLQVDFQKTMKVTGVTTQGVKSLLTSMYVKEFLISSSQDGHQWTLFFQNGKVKVFQGNQDSFTPVVNSLDPPLLTRYLRIHPQSWVHQIALRMEVLGCEAQDLYGAPGTSESATPESGPGSEPATSGSETPGTSESATPESGPGSEPATSGSETPGTSESATPESGPGTSTEPSEGSAPGSPAGSPTSTEEGTSESATPESGPGSEPATSGSETPGTSESATPESGPGSPAGSPTSTEEGSPAGSPTSTEEGTSTEPSEGSAPGTSESATPESGPGTSESATPESGPGTSESATPESGPGSEPATSGSETPGSEPATSGSETPGSPAGSPTSTEEGTSTEPSEGSAPGTSTEPSEGSAPGSEPATSGSETPGTSESATPESGPGTSTEPSEGSAPASSEQKLISEEDLSPATGHHHHHH

SEQ ID NO: 1392 - DNA, 6594 bp, synthetic construct
  misc_feature 1..6594: note = Description of Artificial Sequence: Synthetic polynucleotide
  source 1..6594: mol_type = other DNA
gccaccagaagatactacctgggtgcagtggaactgtcatgggactatatgcaaagtgatctcggtgagctgcctgtggacgcaagatttcctcctagagtgccaaaatcttttccattcaacacctcagtcgtgtacaaaaagactctgtttgtagaattcacggatcaccttttcaacatcgctaagccaaggccaccctggatgggtctgctaggtcctaccatccaggctgaggtttatgatacagtggtcattacacttaagaacatggcttcccatcctgtcagtcttcatgctgttggtgtatcctactggaaagcttctgagggagctgaatatgatgatcagaccagtcaaagggagaaagaagatgataaagtcttccctggtggaagccatacatatgtctggcaggtcctgaaagagaatggtccaatggcctctgacccactgtgccttacctactcatatctttctcatgtggacctggtaaaagacttgaattcaggcctcattggagccctactagtatgtagagaagggagtctggccaaggaaaagacacagaccttgcacaaatttatactactttttgctgtatttgatgaagggaaaagttggcactcagaaacaaagaactccttgatgcaggatagggatgctgcatctgctcgggcctggcctaaaatgcacacagtcaatggttatgtaaacaggtctctgccaggtctgattggatgccacaggaaatcagtctattggcatgtgattggaatgggcaccactcctgaagtgcactcaatattcctcgaaggtcacacatttcttgtgaggaaccatcgccaggctagcttggaaatctcgccaataactttccttactgctcaaacactcttgatggaccttggacagtttctactgttttgtcatatctcttcccaccaacatgatggcatggaagcttatgtcaaagtagacagctgtccagaggaaccccaactacgaatgaaaaataatgaagaagcggaagactatgatgatgatcttactgattctgaaatggatgtggtcaggtttgatgatgacaactctccttcctttatccaaattcgctcagttgccaagaagcatcctaaaacttgggtacattacattgctgctgaagaggaggactgggactatgctcccttagtcctcgcccccgatgacagaagttataaaagtcaatatttgaacaatggccctcagcggattggtaggaagtacaaaaaagtccgatttatggcatacacagatgaaacctttaagactcgtgaagctattcagcatgaatcaggaatcttgggacctttactttatggggaagttggagacacactgttgattatatttaagaatcaagcaagcagaccatataacatctaccctcacggaatcactgatgtccgtcctttgtattcaaggagattaccaaaaggtgtaaaacatttgaaggattttccaattctgccaggagaaatattcaaatataaatggacagtgactgtagaagatgggccaactaaatcagatcctcggtgcctgacccgctattactctagtttcgttaatatggagagagatctagcttcaggactcattggccctctcctcatctgctacaaagaatctgtagatcaaagaggaaaccagataatgtcagacaagaggaatgtcatcctgttttctgtatttgatgagaaccgaagctggtacctcacagagaatatacaacgctttctccccaatccagctggagtgcagcttgaggatccagagttccaagcctccaacatcatgcacagcatcaatggctatgtttttgatagtttgcagttgtcagtttgtttgcatgaggtggcatactggtacattctaagcattggagcacagactgacttcctttctgtcttcttctctggatataccttcaaacacaaaatggtctatgaagacacactcaccctattcccattctcaggagaaactgtcttcatgtcgatggaaaacccaggtctatggattctggggtgccacaactcagactttcggaacagaggcatgaccgccttactgaaggtttctagttgtgacaagaacactggtgattattacgaggacagttatgaagatatttcagcatacttgctgagtaaaaacaatgccattgaaccaagaagcttctctcaaaacggcgcgccaagtcccgctggaagcccaactagcaccgaagaggggacctcagagtccgccacccccgagtccggccctggctctgagcctgccactagcggctccgagactcctggcacatccgaaagcgctacacccgagagtggacccggcacctctaccgagcccagtgagggctccgcccctggaacaagcaccgagcccagcgaaggcagcgccccagggacctccacagagcccagtgaaggcagtgctcctggcaccagcaccgaaccaagcgagggctctgcacccgggacctccaccgagccaagcgaaggctctgcccctggcacttccaccgagcccagcgaaggcagcgcccctgggagccccgctggctctcccaccagcactgaggagggcacatctaccgaaccaagtgaaggctctgcaccaggtgcctcgagcccaccagtcttgaaacgccatcaagctgaaataactcgtactactcttcagtcagatcaagaggaaatcgattatgatgataccatatcagttgaaatgaagaaggaagattttgacatttatgatgaggatgaaaatcagagcccccgcagctttcaaaagaaaacacgacactattttattgctgcagtggagaggctctgggattatgggatgagtagctccccacatgttctaagaaacagggctcagagtggcagtgtccctcagttcaagaaagttgttttccaggaatttactgatggctcctttactcagcccttataccgtggagaactaaatgaacatttgggactcctggggccatatataagagcagaagttgaagataatatcatggtaactttcagaaatcaggcctctcgtccctattccttctattctagccttatttcttatgaggaagatcagaggcaaggagcagaacctagaaaaaactttgtcaagcctaatgaaaccaaaacttacttttggaaagtgcaacatcatatggcacccactaaagatgagtttgactgcaaagcctgggcttatttctctgatgttgacctggaaaaagatgtgcactcaggcctgattggaccccttctggtctgccacactaacacactgaaccctgctcatgggagacaagtgacagtacaggaatttgctctgtttttcaccatctttgatgagaccaaaagctggtacttcactgaaaatatggaaagaaactgcaggggcgcgccaggtacgcccgggtcgggaacagcgtcctcaagcccgggtagctcgacgccgtcaggagccacagggtcgccgggatcgtcgactccatcaggcgcaacgggatcgcctggatcaagcactccatccggagcgacgggaagcccagggagctccccgtccgcatcgactgggacgggacctggagcaagccccggtacgtcgtcaacaggttcgcctggtgcctcgcctggcacgtccagcacggggagccccggaacgccgggttccggaaccgcatcctcctcaccaggtgcctcaccgggcacctcatcaacgggatcaccaggggcttcaccgggaacgagctcgacgggttcaccgggagcgtccccggggacttcgtcgacaggtagcccaggggcaagccccggtacatcgtcaacgggttccccagggacaccggggagcggtactgcatcgtcctcacccggttcctcgacacccagcggagccacgggttcgcccggtactccggggtccggaacggccagcagctcacccggttcctcgacgccatcaggtgccacgggctcgcctggaacgccaggctcgggcactgcgagcagcagccctggatcatcaacgcctagcggagcgaccggctcccctggatcgtcaactccctcgggcgcgactgggagcccaggaagctcaccgtcggcctcgacgggaacagggcctggttcgagcccctcagcttcaacaggaacaggtccaggcgcgtcgccaggtacatcatcgacgggttcgcctgggacccctgggtccggtactgcctcatcatcgcccggatcgtccaccccctcgggagcgacaggttcgcctgcctcgagcgctccctgcaatatccagatggaagatcccacttttaaagagaattatcgcttccatgcaatcaatggctacataatggatacactacctggcttagtaatggctcaggatcaaaggattcgatggtatctgctcagcatgggcagcaatgaaaacatccattctattcatttcagtggacatgtgttcactgtacgaaaaaaagaggagtataaaatggcactgtacaatctctatccaggtgtttttgagacagtggaaatgttaccatccaaagctggaatttggcgggtggaatgccttattggcgagcatctacatgctgggatgagcacactttttctggtgtacagcaataagtgtcagactcccctgggaatggcttctggacacattagagattttcagattacagcttcaggacaatatggacagtgggccccaaagctggccagacttcattattccggatcaatcaatgcctggagcaccaaggagcccttttcttggatcaaggtggatctgttggcaccaatgattattcacggcatcaagacccagggtgcccgtcagaagttctccagcctctacatctctcagtttatcatcatgtatagtcttgatgggaagaagtggcagacttatcgaggaaattccactggaaccttaatggtcttctttggcaatgtggattcatctgggataaaacacaatatttttaaccctccaattattgctcgatacatccgtttgcacccaactcattatagcattcgcagcactcttcgcatggagttgatgggctgtgatttaaatagttgcagcatgccattgggaatggagagtaaagcaatatcagatgcacagattactgcttcatcctactttaccaatatgtttgccacctggtctccttcaaaagctcgacttcacctccaagggaggagtaatgcctggagacctcaggtgaataatccaaaagagtggctgcaagtggacttccagaagacaatgaaagtcacaggagtaactactcagggagtaaaatctctgcttaccagcatgtatgtgaaggagttcctcatctccagcagtcaagatggccatcagtggactctcttttttcagaatggcaaagtaaaggtttttcagggaaatcaagactccttcacacctgtggtgaactctctagacccaccgttactgactcgctaccttcgaattcacccccagagttgggtgcaccagattgccctgaggatggaggttctgggctgcgaggcacaggacctctacggcgcgccaggtacctcagagtctgctacccccgagtcagggccaggatcagagccagccacctccgggtctgagacacccgggacttccgagagtgccacccctgagtccggacccgggtccgagcccgccacttccggctccgaaactcccggcacaagcgagagcgctaccccagagtcaggaccaggaacatctacagagccctctgaaggctccgctccagggtccccagccggcagtcccactagcaccgaggagggaacctctgaaagcgccacacccgaatcagggccagggtctgagcctgctaccagcggcagcgagacaccaggcacctctgagtccgccacaccagagtccggacccggatctcccgctgggagccccacctccactgaggagggatctcctgctggctctccaacatctactgaggaaggtacctcaaccgagccatccgagggatcagctcccggcacctcagagtcggcaaccccggagtctggacccggaacttccgaaagtgccacaccagagtccggtcccgggacttcagaatcagcaacacccgagtccggccctgggtctgaacccgccacaagtggtagtgagacaccaggatcagaacctgctacctcagggtcagagacacccggatctccggcaggctcaccaacctccactgaggagggcaccagcacagaaccaagcgagggctccgcacccggaacaagcactgaacccagtgagggttcagcacccggctctgagccggccacaagtggcagtgagacacccggcacttcagagagtgccacccccgagagtggcccaggcactagtaccgagccctctgaaggcagtgcgccagcctcgagcgaacaaaaactcatctcagaagaggatctgtcacctgcaaccggtcatcatcaccatcaccattga

SEQ ID NO: 1393 - protein, 1763 aa, synthetic construct
  REGION 1..1763: note = Description of Artificial Sequence: Synthetic polypeptide
ATRRYYLGAVELSWDYMQGAPGTPGSGTASSSPGSSTPSGATGSPGSSTPSGATGSPGSSTPSGATGSPGSSPSASTGTGPGASPGTSSTGSPGASPGTSSTGSPGTPGSGTASSSPGASPGTSSTGSPGASPGTSSTGSPGASPGTSSTGSPGASPGTSSTGSPGTPGSGTASSSPGSSTPSGATGSPGTPGSGTASSSPGSSTPSGATGSPGTPGSGTASSSPGSSTPSGATGSPGSSTPSGATGSPGSSPSASTGTGPGSSPSASTGTGPGASPGTSSTGSPGTPGSGTASSSPGSSTPSGATGSPASSSDLGELPVDARFPPRVPKSFPFNTSVVYKKTLFVEFTDHLFNIAKPRPPWMGLLGPTIQAEVYDTVVITLKNMASHPVSLHAVGVSYWKASEGAEYDDQTSQREKEDDKVFPGGSHTYVWQVLKENGPMASDPLCLTYSYLSHVDLVKDLNSGLIGALLVCREGSLAKEKTQTLHKFILLFAVFDEGKSWHSETKNSLMQDRDAASARAWPKMHTVNGYVNRSLPGLIGCHRKSVYWHVIGMGTTPEVHSIFLEGHTFLVRNHRQASLEISPITFLTAQTLLMDLGQFLLFCHISSHQHDGMEAYVKVDSCPEEPQLRMKNNEEAEDYDDDLTDSEMDVVRFDDDNSPSFIQIRSVAKKHPKTWVHYIAAEEEDWDYAPLVLAPDDRSYKSQYLNNGPQRIGRKYKKVRFMAYTDETFKTREAIQHESGILGPLLYGEVGDTLLIIFKNQASRPYNIYPHGITDVRPLYSRRLPKGVKHLKDFPILPGEIFKYKWTVTVEDGPTKSDPRCLTRYYSSFVNMERDLASGLIGPLLICYKESVDQRGNQIMSDKRNVILFSVFDENRSWYLTENIQRFLPNPAGVQLEDPEFQASNIMHSINGYVFDSLQLSVCLHEVAYWYILSIGAQTDFLSVFFSGYTFKHKMVYEDTLTLFPFSGETVFMSMENPGLWILGCHNSDFRNRGMTALLKVSSCDKNTGDYYEDSYEDISAYLLSKNNAIEPRSFSQNPPVLKRHQREITRTTLQSDQEEIDYDDTISVEMKKEDFDIYDEDENQSPRSFQKKTRHYFIAAVERLWDYGMSSSPHVLRNRAQSGSVPQFKKVVFQEFTDGSFTQPLYRGELNEHLGLLGPYIRAEVEDNIMVTFRNQASRPYSFYSSLISYEEDQRQGAEPRKNFVKPNETKTYFWKVQHHMAPTKDEFDCKAWAYFSDVDLEKDVHSGLIGPLLVCHTNTLNPAHGRQVTVQEFALFFTIFDETKSWYFTENMERNCRAPCNIQMEDPTFKENYRFHAINGYIMDTLPGLVMAQDQRIRWYLLSMGSNENIHSIHFSGHVFTVRKKEEYKMALYNLYPGVFETVEMLPSKAGIWRVECLIGEHLHAGMSTLFLVYSNKCQTPLGMASGHIRDFQITASGQYGQWAPKLARLHYSGSINAWSTKEPFSWIKVDLLAPMIIHGIKTQGARQKFSSLYISQFIIMYSLDGKKWQTYRGNSTGTLMVFFGNVDSSGIKHNIFNPPIIARYIRLHPTHYSIRSTLRMELMGCDLNSCSMPLGMESKAISDAQITASSYFTNMFATWSPSKARLHLQGRSNAWRPQVNNPKEWLQVDFQKTMKVTGVTTQGVKSLLTSMYVKEFLISSSQDGHQWTLFFQNGKVKVFQGNQDSFTPVVNSLDPPLLTRYLRIHPQSWVHQIALRMEVLGCEAQDLYGAGSPGAETAEQKLISEEDLSPATGHHHHHH

SEQ ID NO: 1394 - DNA, 5292 bp, synthetic construct
  misc_feature 1..5292: note = Description of Artificial Sequence: Synthetic polynucleotide
  source 1..5292: mol_type = other DNA
gccaccagaagatactacctgggtgcagtggaactgtcatgggactatatgcaaggcgcgccaggtacgcccgggtcgggaacagcgtcctcaagcccgggtagctcgacgccgtcaggagccacagggtcgccgggatcgtcgactccatcaggcgcaacgggatcgcctggatcaagcactccatccggagcgacgggaagcccagggagctccccgtccgcatcgactgggacgggacctggagcaagccccggtacgtcgtcaacaggttcgcctggtgcctcgcctggcacgtccagcacggggagccccggaacgccgggttccggaaccgcatcctcctcaccaggtgcctcaccgggcacctcatcaacgggatcaccaggggcttcaccgggaacgagctcgacgggttcaccgggagcgtccccggggacttcgtcgacaggtagcccaggggcaagccccggtacatcgtcaacgggttccccagggacaccggggagcggtactgcatcgtcctcacccggttcctcgacacccagcggagccacgggttcgcccggtactccggggtccggaacggccagcagctcacccggttcctcgacgccatcaggtgccacgggctcgcctggaacgccaggctcgggcactgcgagcagcagccctggatcatcaacgcctagcggagcgaccggctcccctggatcgtcaactccctcgggcgcgactgggagcccaggaagctcaccgtcggcctcgacgggaacagggcctggttcgagcccctcagcttcaacaggaacaggtccaggcgcgtcgccaggtacatcatcgacgggttcgcctgggacccctgggtccggtactgcctcatcatcgcccggatcgtccaccccctcgggagcgacaggttcgcctgcctcgagcagtgatctcggtgagctgcctgtggacgcaagatttcctcctagagtgccaaaatcttttccattcaacacctcagtcgtgtacaaaaagactctgtttgtagaattcacggatcaccttttcaacatcgctaagccaaggccaccctggatgggtctgctaggtcctaccatccaggctgaggtttatgatacagtggtcattacacttaagaacatggcttcccatcctgtcagtcttcatgctgttggtgtatcctactggaaagcttctgagggagctgaatatgatgatcagaccagtcaaagggagaaagaagatgataaagtcttccctggtggaagccatacatatgtctggcaggtcctgaaagagaatggtccaatggcctctgacccactgtgccttacctactcatatctttctcatgtggacctggtaaaagacttgaattcaggcctcattggagccctactagtatgtagagaagggagtctggccaaggaaaagacacagaccttgcacaaatttatactactttttgctgtatttgatgaagggaaaagttggcactcagaaacaaagaactccttgatgcaggatagggatgctgcatctgctcgggcctggcctaaaatgcacacagtcaatggttatgtaaacaggtctctgccaggtctgattggatgccacaggaaatcagtctattggcatgtgattggaatgggcaccactcctgaagtgcactcaatattcctcgaaggtcacacatttcttgtgaggaaccatcgccaggctagcttggaaatctcgccaataactttccttactgctcaaacactcttgatggaccttggacagtttctactgttttgtcatatctcttcccaccaacatgatggcatggaagcttatgtcaaagtagacagctgtccagaggaaccccaactacgaatgaaaaataatgaagaagcggaagactatgatgatgatcttactgattctgaaatggatgtggtcaggtttgatgatgacaactctccttcctttatccaaattcgctcagttgccaagaagcatcctaaaacttgggtacattacattgctgctgaagaggaggactgggactatgctcccttagtcctcgcccccgatgacagaagttataaaagtcaatatttgaacaatggccctcagcggattggtaggaagtacaaaaaagtccgatttatggcatacacagatgaaacctttaagactcgtgaagctattcagcatgaatcaggaatcttgggacctttactttatggggaagttggagacacactgttgattatatttaagaatcaagcaagcagaccatataacatctaccctcacggaatcactgatgtccgtcctttgtattcaaggagattaccaaaaggtgtaaaacatttgaaggattttccaattctgccaggagaaatattcaaatataaatggacagtgactgtagaagatgggccaactaaatcagatcctcggtgcctgacccgctattactctagtttcgttaatatggagagagatctagcttcaggactcattggccctctcctcatctgctacaaagaatctgtagatcaaagaggaaaccagataatgtcagacaagaggaatgtcatcctgttttctgtatttgatgagaaccgaagctggtacctcacagagaatatacaacgctttctccccaatccagctggagtgcagcttgaggatccagagttccaagcctccaacatcatgcacagcatcaatggctatgtttttgatagtttgcagttgtcagtttgtttgcatgaggtggcatactggtacattctaagcattggagcacagactgacttcctttctgtcttcttctctggatataccttcaaacacaaaatggtctatgaagacacactcaccctattcccattctcaggagaaactgtcttcatgtcgatggaaaacccaggtctatggattctggggtgccacaactcagactttcggaacagaggcatgaccgccttactgaaggtttctagttgtgacaagaacactggtgattattacgaggacagttatgaagatatttcagcatacttgctgagtaaaaacaatgccattgaaccaagaagcttctctcaaaacccaccagtcttgaaacgccatcaacgggaaataactcgtactactcttcagtcagatcaagaggaaatcgattatgatgataccatatcagttgaaatgaagaaggaagattttgacatttatgatgaggatgaaaatcagagcccccgcagctttcaaaagaaaacacgacactattttattgctgcagtggagaggctctgggattatgggatgagtagctccccacatgttctaagaaacagggctcagagtggcagtgtccctcagttcaagaaagttgttttccaggaatttactgatggctcctttactcagcccttataccgtggagaactaaatgaacatttgggactcctggggccatatataagagcagaagttgaagataatatcatggtaactttcagaaatcaggcctctcgtccctattccttctattctagccttatttcttatgaggaagatcagaggcaaggagcagaacctagaaaaaactttgtcaagcctaatgaaaccaaaacttacttttggaaagtgcaacatcatatggcacccactaaagatgagtttgactgcaaagcctgggcttatttctctgatgttgacctggaaaaagatgtgcactcaggcctgattggaccccttctggtctgccacactaacacactgaaccctgctcatgggagacaagtgacagtacaggaatttgctctgtttttcaccatctttgatgagaccaaaagctggtacttcactgaaaatatggaaagaaactgcagggctccctgcaatatccagatggaagatcccacttttaaagagaattatcgcttccatgcaatcaatggctacataatggatacactacctggcttagtaatggctcaggatcaaaggattcgatggtatctgctcagcatgggcagcaatgaaaacatccattctattcatttcagtggacatgtgttcactgtacgaaaaaaagaggagtataaaatggcactgtacaatctctatccaggtgtttttgagacagtggaaatgttaccatccaaagctggaatttggcgggtggaatgccttattggcgagcatctacatgctgggatgagcacactttttctggtgtacagcaataagtgtcagactcccctgggaatggcttctggacacattagagattttcagattacagcttcaggacaatatggacagtgggccccaaagctggccagacttcattattccggatcaatcaatgcctggagcaccaaggagcccttttcttggatcaaggtggatctgttggcaccaatgattattcacggcatcaagacccagggtgcccgtcagaagttctccagcctctacatctctcagtttatcatcatgtatagtcttgatgggaagaagtggcagacttatcgaggaaattccactggaaccttaatggtcttctttggcaatgtggattcatctgggataaaacacaatatttttaaccctccaattattgctcgatacatccgtttgcacccaactcattatagcattcgcagcactcttcgcatggagttgatgggctgtgatttaaatagttgcagcatgccattgggaatggagagtaaagcaatatcagatgcacagattactgcttcatcctactttaccaatatgtttgccacctggtctccttcaaaagctcgacttcacctccaagggaggagtaatgcctggagacctcaggtgaataatccaaaagagtggctgcaagtggacttccagaagacaatgaaagtcacaggagtaactactcagggagtaaaatctctgcttaccagcatgtatgtgaaggagttcctcatctccagcagtcaagatggccatcagtggactctcttttttcagaatggcaaagtaaaggtttttcagggaaatcaagactccttcacacctgtggtgaactctctagacccaccgttactgactcgctaccttcgaattcacccccagagttgggtgcaccagattgccctgaggatggaggttctgggctgcgaggcacaggacctctacggcgccggatcacctggggccgaaacggccgaacaaaaactcatctcagaagaggatctgtcacctgcaaccggtcatcatcaccatcaccattga

SEQ ID NO: 1395 - protein, 1763 aa, synthetic construct
  REGION 1..1763: note = Description of Artificial Sequence: Synthetic polypeptide
ATRRYYLGAVELSWDYMQSDLGELPVDARFPPRVPKSFPFNTSVVYKKTLFVEFTDHLFNIAKPRPPWMGLLGPTIQAEVYDTVVITLKNMASHPVSLHAVGVSYWKASEGAEYDDQTSQREKEDDKVFPGGSHTYVWQVLKENGPMASDPLCLTYSYLSHVDLVKDLNSGLIGALLVCREGSLAKEKTQTLHKFILLFAVFDEGKSWHSETKNSLMQDRDAASARAWPKMHTVNGYVNRSLPGLIGCHRKSVYWHVIGMGTTPEVHSIFLEGHTFLVRNHRQASLEISPITFLTAQTLLMDLGQFLLFCHISSHQHDGMEAYVKVDSCPEEPQLRMKNNEEAEDYDDDLTDSEMDVVRFDDDNSPSFIQIRSVAKKHPKTWVHYIAAEEEDWDYAPLVLAPDGAPGTPGSGTASSSPGSSTPSGATGSPGSSTPSGATGSPGSSTPSGATGSPGSSPSASTGTGPGASPGTSSTGSPGASPGTSSTGSPGTPGSGTASSSPGASPGTSSTGSPGASPGTSSTGSPGASPGTSSTGSPGASPGTSSTGSPGTPGSGTASSSPGSSTPSGATGSPGTPGSGTASSSPGSSTPSGATGSPGTPGSGTASSSPGSSTPSGATGSPGSSTPSGATGSPGSSPSASTGTGPGSSPSASTGTGPGASPGTSSTGSPGTPGSGTASSSPGSSTPSGATGSPASSDRSYKSQYLNNGPQRIGRKYKKVRFMAYTDETFKTREAIQHESGILGPLLYGEVGDTLLIIFKNQASRPYNIYPHGITDVRPLYSRRLPKGVKHLKDFPILPGEIFKYKWTVTVEDGPTKSDPRCLTRYYSSFVNMERDLASGLIGPLLICYKESVDQRGNQIMSDKRNVILFSVFDENRSWYLTENIQRFLPNPAGVQLEDPEFQASNIMHSINGYVFDSLQLSVCLHEVAYWYILSIGAQTDFLSVFFSGYTFKHKMVYEDTLTLFPFSGETVFMSMENPGLWILGCHNSDFRNRGMTALLKVSSCDKNTGDYYEDSYEDISAYLLSKNNAIEPRSFSQNPPVLKRHQREITRTTLQSDQEEIDYDDTISVEMKKEDFDIYDEDENQSPRSFQKKTRHYFIAAVERLWDYGMSSSPHVLRNRAQSGSVPQFKKVVFQEFTDGSFTQPLYRGELNEHLGLLGPYIRAEVEDNIMVTFRNQASRPYSFYSSLISYEEDQRQGAEPRKNFVKPNETKTYFWKVQHHMAPTKDEFDCKAWAYFSDVDLEKDVHSGLIGPLLVCHTNTLNPAHGRQVTVQEFALFFTIFDETKSWYFTENMERNCRAPCNIQMEDPTFKENYRFHAINGYIMDTLPGLVMAQDQRIRWYLLSMGSNENIHSIHFSGHVFTVRKKEEYKMALYNLYPGVFETVEMLPSKAGIWRVECLIGEHLHAGMSTLFLVYSNKCQTPLGMASGHIRDFQITASGQYGQWAPKLARLHYSGSINAWSTKEPFSWIKVDLLAPMIIHGIKTQGARQKFSSLYISQFIIMYSLDGKKWQTYRGNSTGTLMVFFGNVDSSGIKHNIFNPPIIARYIRLHPTHYSIRSTLRMELMGCDLNSCSMPLGMESKAISDAQITASSYFTNMFATWSPSKARLHLQGRSNAWRPQVNNPKEWLQVDFQKTMKVTGVTTQGVKSLLTSMYVKEFLISSSQDGHQWTLFFQNGKVKVFQGNQDSFTPVVNSLDPPLLTRYLRIHPQSWVHQIALRMEVLGCEAQDLYGAGSPGAETAEQKLISEEDLSPATGHHHHHH

SEQ ID NO: 1396 - DNA, 5292 bp, synthetic construct
  misc_feature 1..5292: note = Description of Artificial Sequence: Synthetic polynucleotide
  source 1..5292: mol_type = other DNA
gccaccagaagatactacctgggtgcagtggaactgtcatgggactatatgcaaagtgatctcggtgagctgcctgtggacgcaagatttcctcctagagtgccaaaatcttttccattcaacacctcagtcgtgtacaaaaagactctgtttgtagaattcacggatcaccttttcaacatcgctaagccaaggccaccctggatgggtctgctaggtcctaccatccaggctgaggtttatgatacagtggtcattacacttaagaacatggcttcccatcctgtcagtcttcatgctgttggtgtatcctactggaaagcttctgagggagctgaatatgatgatcagaccagtcaaagggagaaagaagatgataaagtcttccctggtggaagccatacatatgtctggcaggtcctgaaagagaatggtccaatggcctctgacccactgtgccttacctactcatatctttctcatgtggacctggtaaaagacttgaattcaggcctcattggagccctactagtatgtagagaagggagtctggccaaggaaaagacacagaccttgcacaaatttatactactttttgctgtatttgatgaagggaaaagttggcactcagaaacaaagaactccttgatgcaggatagggatgctgcatctgctcgggcctggcctaaaatgcacacagtcaatggttatgtaaacaggtctctgccaggtctgattggatgccacaggaaatcagtctattggcatgtgattggaatgggcaccactcctgaagtgcactcaatattcctcgaaggtcacacatttcttgtgaggaaccatcgccaggctagcttggaaatctcgccaataactttccttactgctcaaacactcttgatggaccttggacagtttctactgttttgtcatatctcttcccaccaacatgatggcatggaagcttatgtcaaagtagacagctgtccagaggaaccccaactacgaatgaaaaataatgaagaagcggaagactatgatgatgatcttactgattctgaaatggatgtggtcaggtttgatgatgacaactctccttcctttatccaaattcgctcagttgccaagaagcatcctaaaacttgggtacattacattgctgctgaagaggaggactgggactatgctcccttagtcctcgcccccgatggcgcgccaggtacgcccgggtcgggaacagcgtcctcaagcccgggtagctcgacgccgtcaggagccacagggtcgccgggatcgtcgactccatcaggcgcaacgggatcgcctggatcaagcactccatccggagcgacgggaagcccagggagctccccgtccgcatcgactgggacgggacctggagcaagccccggtacgtcgtcaacaggttcgcctggtgcctcgcctggcacgtccagcacggggagccccggaacgccgggttccggaaccgcatcctcctcaccaggtgcctcaccgggcacctcatcaacgggatcaccaggggcttcaccgggaacgagctcgacgggttcaccgggagcgtccccggggacttcgtcgacaggtagcccaggggcaagccccggtacatcgtcaacgggttccccagggacaccggggagcggtactgcatcgtcctcacccggttcctcgacacccagcggagccacgggttcgcccggtactccggggtccggaacggccagcagctcacccggttcctcgacgccatcaggtgccacgggctcgcctggaacgccaggctcgggcactgcgagcagcagccctggatcatcaacgcctagcggagcgaccggctcccctggatcgtcaactccctcgggcgcgactgggagcccaggaagctcaccgtcggcctcgacgggaacagggcctggttcgagcccctcagcttcaacaggaacaggtccaggcgcgtcgccaggtacatcatcgacgggttcgcctgggacccctgggtccggtactgcctcatcatcgcccggatcgtccaccccctcgggagcgacaggttcgcctgcctcgagcgacagaagttataaaagtcaatatttgaacaatggccctcagcggattggtaggaagtacaaaaaagtccgatttatggcatacacagatgaaacctttaagactcgtgaagctattcagcatgaatcaggaatcttgggacctttactttatggggaagttggagacacactgttgattatatttaagaatcaagcaagcagaccatataacatctaccctcacggaatcactgatgtccgtcctttgtattcaaggagattaccaaaaggtgtaaaacatttgaaggattttccaattctgccaggagaaatattcaaatataaatggacagtgactgtagaagatgggccaactaaatcagatcctcggtgcctgacccgctattactctagtttcgttaatatggagagagatctagcttcaggactcattggccctctcctcatctgctacaaagaatctgtagatcaaagaggaaaccagataatgtcagacaagaggaatgtcatcctgttttctgtatttgatgagaaccgaagctggtacctcacagagaatatacaacgctttctccccaatccagctggagtgcagcttgaggatccagagttccaagcctccaacatcatgcacagcatcaatggctatgtttttgatagtttgcagttgtcagtttgtttgcatgaggtggcatactggtacattctaagcattggagcacagactgacttcctttctgtcttcttctctggatataccttcaaacacaaaatggtctatgaagacacactcaccctattcccattctcaggagaaactgtcttcatgtcgatggaaaacccaggtctatggattctggggtgccacaactcagactttcggaacagaggcatgaccgccttactgaaggtttctagttgtgacaagaacactggtgattattacgaggacagttatgaagatatttcagcatacttgctgagtaaaaacaatgccattgaaccaagaagcttctctcaaaacccaccagtcttgaaacgccatcaacgggaaataactcgtactactcttcagtcagatcaagaggaaatcgattatgatgataccatatcagttgaaatgaagaaggaagattttgacatttatgatgaggatgaaaatcagagcccccgcagctttcaaaagaaaacacgacactattttattgctgcagtggagaggctctgggattatgggatgagtagctccccacatgttctaagaaacagggctcagagtggcagtgtccctcagttcaagaaagttgttttccaggaatttactgatggctcctttactcagcccttataccgtggagaactaaatgaacatttgggactcctggggccatatataagagcagaagttgaagataatatcatggtaactttcagaaatcaggcctctcgtccctattccttctattctagccttatttcttatgaggaagatcagaggcaaggagcagaacctagaaaaaactttgtcaagcctaatgaaaccaaaacttacttttggaaagtgcaacatcatatggcacccactaaagatgagtttgactgcaaagcctgggcttatttctctgatgttgacctggaaaaagatgtgcactcaggcctgattggaccccttctggtctgccacactaacacactgaaccctgctcatgggagacaagtgacagtacaggaatttgctctgtttttcaccatctttgatgagaccaaaagctggtacttcactgaaaatatggaaagaaactgcagggctccctgcaatatccagatggaagatcccacttttaaagagaattatcgcttccatgcaatcaatggctacataatggatacactacctggcttagtaatggctcaggatcaaaggattcgatggtatctgctcagcatgggcagcaatgaaaacatccattctattcatttcagtggacatgtgttcactgtacgaaaaaaagaggagtataaaatggcactgtacaatctctatccaggtgtttttgagacagtggaaatgttaccatccaaagctggaatttggcgggtggaatgccttattggcgagcatctacatgctgggatgagcacactttttctggtgtacagcaataagtgtcagactcccctgggaatggcttctggacacattagagattttcagattacagcttcaggacaatatggacagtgggccccaaagctggccagacttcattattccggatcaatcaatgcctggagcaccaaggagcccttttcttggatcaaggtggatctgttggcaccaatgattattcacggcatcaagacccagggtgcccgtcagaagttctccagcctctacatctctcagtttatcatcatgtatagtcttgatgggaagaagtggcagacttatcgaggaaattccactggaaccttaatggtcttctttggcaatgtggattcatctgggataaaacacaatatttttaaccctccaattattgctcgatacatccgtttgcacccaactcattatagcattcgcagcactcttcgcatggagttgatgggctgtgatttaaatagttgcagcatgccattgggaatggagagtaaagcaatatcagatgcacagattactgcttcatcctactttaccaatatgtttgccacctggtctccttcaaaagctcgacttcacctccaagggaggagtaatgcctggagacctcaggtgaataatccaaaagagtggctgcaagtggacttccagaagacaatgaaagtcacaggagtaactactcagggagtaaaatctctgcttaccagcatgtatgtgaaggagttcctcatctccagcagtcaagatggccatcagtggactctcttttttcagaatggcaaagtaaaggtttttcagggaaatcaagactccttcacacctgtggtgaactctctagacccaccgttactgactcgctaccttcgaattcacccccagagttgggtgcaccagattgccctgaggatggaggttctgggctgcgaggcacaggacctctacggcgccggatcacctggggccgaaacggccgaacaaaaactcatctcagaagaggatctgtcacctgcaaccggtcatcatcaccatcaccattga

SEQ ID NO: 1397 - protein, 1766 aa, synthetic construct
  REGION 1..1766: note = Description of Artificial Sequence: Synthetic polypeptide
ATRRYYLGAVELSWDYMQSDLGELPVDARFPPRVPKSFPFNTSVVYKKTLFVEFTDHLFNIAKPRPPWMGLLGPTIQAEVYDTVVITLKNMASHPVSLHAVGVSYWKASEGAEYDDQTSQREKEDDKVFPGGSHTYVWQVLKENGPMASDPLCLTYSYLSHVDLVKDLNSGLIGALLVCREGSLAKEKTQTLHKFILLFAVFDEGKSWHSETKNSLMQDRDAASARAWPKMHTVNGYVNRSLPGLIGCHRKSVYWHVIGMGTTPEVHSIFLEGHTFLVRNHRQASLEISPITFLTAQTLLMDLGQFLLFCHISSHQHDGMEAYVKVDSCPEEPQLRMKNNEEAEDYDDDLTDSEMDVVRFDDDNSPSFIQIRSVAKKHPKTWVHYIAAEEEDWDYAPLVLAPDDRSYKSQYLNNGPQRIGRKYKKVRFMAYTDETFKTREAIQHESGILGPLLYGEVGDTLLIIFKNQASRPYNIYPHGITDVRPLYSRRLPKGVKHLKDFPILPGEIFKYKWTVTVEDGPTKSDPRCLTRYYSSFVNMERDLASGLIGPLLICYKESVDQRGNQIMSDKRNVILFSVFDENRSWYLTENIQRFLPNPAGVQLEDPEFQASNIMHSINGYVFDSLQLSVCLHEVAYWYILSIGAQTDFLSVFFSGYTFKHKMVYEDTLTLFPFSGETVFMSMENPGLWILGCHNSDFRNRGMTALLKVSSCDKNTGDYYEDSYEDISAYLLSKNNAIEPRSFSQNPPVLKRHQREITRTTLQSDQEEIDYDDTISVEMKKEDFDIYDEDENQSPRSFQKKTRHYFIAAVERLWDYGMSSSPHVLRNRAQGAPGTPGSGTASSSPGSSTPSGATGSPGSSTPSGATGSPGSSTPSGATGSPGSSPSASTGTGPGASPGTSSTGSPGASPGTSSTGSPGTPGSGTASSSPGASPGTSSTGSPGASPGTSSTGSPGASPGTSSTGSPGASPGTSSTGSPGTPGSGTASSSPGSSTPSGATGSPGTPGSGTASSSPGSSTPSGATGSPGTPGSGTASSSPGSSTPSGATGSPGSSTPSGATGSPGSSPSASTGTGPGSSPSASTGTGPGASPGTSSTGSPGTPGSGTASSSPGSSTPSGATGSPASSRAQSGSVPQFKKVVFQEFTDGSFTQPLYRGELNEHLGLLGPYIRAEVEDNIMVTFRNQASRPYSFYSSLISYEEDQRQGAEPRKNFVKPNETKTYFWKVQHHMAPTKDEFDCKAWAYFSDVDLEKDVHSGLIGPLLVCHTNTLNPAHGRQVTVQEFALFFTIFDETKSWYFTENMERNCRAPCNIQMEDPTFKENYRFHAINGYIMDTLPGLVMAQDQRIRWYLLSMGSNENIHSIHFSGHVFTVRKKEEYKMALYNLYPGVFETVEMLPSKAGIWRVECLIGEHLHAGMSTLFLVYSNKCQTPLGMASGHIRDFQITASGQYGQWAPKLARLHYSGSINAWSTKEPFSWIKVDLLAPMIIHGIKTQGARQKFSSLYISQFIIMYSLDGKKWQTYRGNSTGTLMVFFGNVDSSGIKHNIFNPPIIARYIRLHPTHYSIRSTLRMELMGCDLNSCSMPLGMESKAISDAQITASSYFTNMFATWSPSKARLHLQGRSNAWRPQVNNPKEWLQVDFQKTMKVTGVTTQGVKSLLTSMYVKEFLISSSQDGHQWTLFFQNGKVKVFQGNQDSFTPVVNSLDPPLLTRYLRIHPQSWVHQIALRMEVLGCEAQDLYGAGSPGAETAEQKLISEEDLSPATGHHHHHH

SEQ ID NO: 1398 - DNA, 5301 bp, synthetic construct
  misc_feature 1..5301: note = Description of Artificial Sequence: Synthetic polynucleotide
  source 1..5301: mol_type = other DNA
gccaccagaagatactacctgggtgcagtggaactgtcatgggactatatgcaaagtgatctcggtgagctgcctgtggacgcaagatttcctcctagagtgccaaaatcttttccattcaacacctcagtcgtgtacaaaaagactctgtttgtagaattcacggatcaccttttcaacatcgctaagccaaggccaccctggatgggtctgctaggtcctaccatccaggctgaggtttatgatacagtggtcattacacttaagaacatggcttcccatcctgtcagtcttcatgctgttggtgtatcctactggaaagcttctgagggagctgaatatgatgatcagaccagtcaaagggagaaagaagatgataaagtcttccctggtggaagccatacatatgtctggcaggtcctgaaagagaatggtccaatggcctctgacccactgtgccttacctactcatatctttctcatgtggacctggtaaaagacttgaattcaggcctcattggagccctactagtatgtagagaagggagtctggccaaggaaaagacacagaccttgcacaaatttatactactttttgctgtatttgatgaagggaaaagttggcactcagaaacaaagaactccttgatgcaggatagggatgctgcatctgctcgggcctggcctaaaatgcacacagtcaatggttatgtaaacaggtctctgccaggtctgattggatgccacaggaaatcagtctattggcatgtgattggaatgggcaccactcctgaagtgcactcaatattcctcgaaggtcacacatttcttgtgaggaaccatcgccaggctagcttggaaatctcgccaataactttccttactgctcaaacactcttgatggaccttggacagtttctactgttttgtcatatctcttcccaccaacatgatggcatggaagcttatgtcaaagtagacagctgtccagaggaaccccaactacgaatgaaaaataatgaagaagcggaagactatgatgatgatcttactgattctgaaatggatgtggtcaggtttgatgatgacaactctccttcctttatccaaattcgctcagttgccaagaagcatcctaaaacttgggtacattacattgctgctgaagaggaggactgggactatgctcccttagtcctcgcccccgatgacagaagttataaaagtcaatatttgaacaatggccctcagcggattggtaggaagtacaaaaaagtccgatttatggcatacacagatgaaacctttaagactcgtgaagctattcagcatgaatcaggaatcttgggacctttactttatggggaagttggagacacactgttgattatatttaagaatcaagcaagcagaccatataacatctaccctcacggaatcactgatgtccgtcctttgtattcaaggagattaccaaaaggtgtaaaacatttgaaggattttccaattctgccaggagaaatattcaaatataaatggacagtgactgtagaagatgggccaactaaatcagatcctcggtgcctgacccgctattactctagtttcgttaatatggagagagatctagcttcaggactcattggccctctcctcatctgctacaaagaatctgtagatcaaagaggaaaccagataatgtcagacaagaggaatgtcatcctgttttctgtatttgatgagaaccgaagctggtacctcacagagaatatacaacgctttctccccaatccagctggagtgcagcttgaggatccagagttccaagcctccaacatcatgcacagcatcaatggctatgtttttgatagtttgcagttgtcagtttgtttgcatgaggtggcatactggtacattctaagcattggagcacagactgacttcctttctgtcttcttctctggatataccttcaaacacaaaatggtctatgaagacacactcaccctattcccattctcaggagaaactgtcttcatgtcgatggaaaacccaggtctatggattctggggtgccacaactcagactttcggaacagaggcatgaccgccttactgaaggtttctagttgtgacaagaacactggtgattattacgaggacagttatgaagatatttcagcatacttgctgagtaaaaacaatgccattgaaccaagaagcttctctcaaaacccaccagtcttgaaacgccatcaacgggaaataactcgtactactcttcagtcagatcaagaggaaatcgattatgatgataccatatcagttgaaatgaagaaggaagattttgacatttatgatgaggatgaaaatcagagcccccgcagctttcaaaagaaaacacgacactattttattgctgcagtggagaggctctgggattatgggatgagtagctccccacatgttctaagaaacagggctcagggcgcgccaggtacgcccgggtcgggaacagcgtcctcaagcccgggtagctcgacgccgtcaggagccacagggtcgccgggatcgtcgactccatcaggcgcaacgggatcgcctggatcaagcactccatccggagcgacgggaagcccagggagctccccgtccgcatcgactgggacgggacctggagcaagccccggtacgtcgtcaacaggttcgcctggtgcctcgcctggcacgtccagcacggggagccccggaacgccgggttccggaaccgcatcctcctcaccaggtgcctcaccgggcacctcatcaacgggatcaccaggggcttcaccgggaacgagctcgacgggttcaccgggagcgtccccggggacttcgtcgacaggtagcccaggggcaagccccggtacatcgtcaacgggttccccagggacaccggggagcggtactgcatcgtcctcacccggttcctcgacacccagcggagccacgggttcgcccggtactccggggtccggaacggccagcagctcacccggttcctcgacgccatcaggtgccacgggctcgcctggaacgccaggctcgggcactgcgagcagcagccctggatcatcaacgcctagcggagcgaccggctcccctggatcgtcaactccctcgggcgcgactgggagcccaggaagctcaccgtcggcctcgacgggaacagggcctggttcgagcccctcagcttcaacaggaacaggtccaggcgcgtcgccaggtacatcatcgacgggttcgcctgggacccctgggtccggtactgcctcatcatcgcccggatcgtccaccccctcgggagcgacaggttcgcctgcctcgagcagggctcagagtggcagtgtccctcagttcaagaaagttgttttccaggaatttactgatggctcctttactcagcccttataccgtggagaactaaatgaacatttgggactcctggggccatatataagagcagaagttgaagataatatcatggtaactttcagaaatcaggcctctcgtccctattccttctattctagccttatttcttatgaggaagatcagaggcaaggagcagaacctagaaaaaactttgtcaagcctaatgaaaccaaaacttacttttggaaagtgcaacatcatatggcacccactaaagatgagtttgactgcaaagcctgggcttatttctctgatgttgacctggaaaaagatgtgcactcaggcctgattggaccccttctggtctgccacactaacacactgaaccctgctcatgggagacaagtgacagtacaggaatttgctctgtttttcaccatctttgatgagaccaaaagctggtacttcactgaaaatatggaaagaaactgcagggctccctgcaatatccagatggaagatcccacttttaaagagaattatcgcttccatgcaatcaatggctacataatggatacactacctggcttagtaatggctcaggatcaaaggattcgatggtatctgctcagcatgggcagcaatgaaaacatccattctattcatttcagtggacatgtgttcactgtacgaaaaaaagaggagtataaaatggcactgtacaatctctatccaggtgtttttgagacagtggaaatgttaccatccaaagctggaatttggcgggtggaatgccttattggcgagcatctacatgctgggatgagcacactttttctggtgtacagcaataagtgtcagactcccctgggaatggcttctggacacattagagattttcagattacagcttcaggacaatatggacagtgggccccaaagctggccagacttcattattccggatcaatcaatgcctggagcaccaaggagcccttttcttggatcaaggtggatctgttggcaccaatgattattcacggcatcaagacccagggtgcccgtcagaagttctccagcctctacatctctcagtttatcatcatgtatagtcttgatgggaagaagtggcagacttatcgaggaaattccactggaaccttaatggtcttctttggcaatgtggattcatctgggataaaacacaatatttttaaccctccaattattgctcgatacatccgtttgcacccaactcattatagcattcgcagcactcttcgcatggagttgatgggctgtgatttaaatagttgcagcatgccattgggaatggagagtaaagcaatatcagatgcacagattactgcttcatcctactttaccaatatgtttgccacctggtctccttcaaaagctcgacttcacctccaagggaggagtaatgcctggagacctcaggtgaataatccaaaagagtggctgcaagtggacttccagaagacaatgaaagtcacaggagtaactactcagggagtaaaatctctgcttaccagcatgtatgtgaaggagttcctcatctccagcagtcaagatggccatcagtggactctcttttttcagaatggcaaagtaaaggtttttcagggaaatcaagactccttcacacctgtggtgaactctctagacccaccgttactgactcgctaccttcgaattcacccccagagttgggtgcaccagattgccctgaggatggaggttctgggctgcgaggcacaggacctctacggcgccggatcacctggggccgaaacggccgaacaaaaactcatctcagaagaggatctgtcacctgcaaccggtcatcatcaccatcaccattga

SEQ ID NO: 1399 - protein, 1763 aa, synthetic construct
  REGION 1..1763: note = Description of Artificial Sequence: Synthetic polypeptide
ATRRYYLGAVELSWDYMQSDLGELPVDARFPPRVPKSFPFNTSVVYKKTLFVEFTDHLFNIAKPRPPWMGLLGPTIQAEVYDTVVITLKNMASHPVSLHAVGVSYWKASEGAEYDDQTSQREKEDDKVFPGGSHTYVWQVLKENGPMASDPLCLTYSYLSHVDLVKDLNSGLIGALLVCREGSLAKEKTQTLHKFILLFAVFDEGKSWHSETKNSLMQDRDAASARAWPKMHTVNGYVNRSLPGLIGCHRKSVYWHVIGMGTTPEVHSIFLEGHTFLVRNHRQASLEISPITFLTAQTLLMDLGQFLLFCHISSHQHDGMEAYVKVDSCPEEPQLRMKNNEEAEDYDDDLTDSEMDVVRFDDDNSPSFIQIRSVAKKHPKTWVHYIAAEEEDWDYAPLVLAPDDRSYKSQYLNNGPQRIGRKYKKVRFMAYTDETFKTREAIQHESGILGPLLYGEVGDTLLIIFKNQASRPYNIYPHGITDVRPLYSRRLPKGVKHLKDFPILPGEIFKYKWTVTVEDGPTKSDPRCLTRYYSSFVNMERDLASGLIGPLLICYKESVDQRGNQIMSDKRNVILFSVFDENRSWYLTENIQRFLPNPAGVQLEDPEFQASNIMHSINGYVFDSLQLSVCLHEVAYWYILSIGAQTDFLSVFFSGYTFKHKMVYEDTLTLFPFSGETVFMSMENPGLWILGCHNSDFRNRGMTALLKVSSCDKNTGDYYEDSYEDISAYLLSKNNAIEPRSFSQNPPVLKRHQREITRTTLQSDQEEIDYDDTISVEMKKEDFDIYDEDENQSPRSFQKKTRHYFIAAVERLWDYGMSSSPHVLRNRAQSGSVPQFKKVVFQEFTDGSFTQPLYRGELNEHLGLLGPYIRAEVEDNIMVTFRNQASRPYSFYSSLISYEEDQRQGAEPRKNFVKPNETKTYFWKVQHHMAPTKDEFDCKAWAYFSDVDLEKDVHSGLIGPLLVCHTNTLNPAHGRQVTVQEFALFFTIFDETKSWYFTENMERNCRGAPGTPGSGTASSSPGSSTPSGATGSPGSSTPSGATGSPGSSTPSGATGSPGSSPSASTGTGPGASPGTSSTGSPGASPGTSSTGSPGTPGSGTASSSPGASPGTSSTGSPGASPGTSSTGSPGASPGTSSTGSPGASPGTSSTGSPGTPGSGTASSSPGSSTPSGATGSPGTPGSGTASSSPGSSTPSGATGSPGTPGSGTASSSPGSSTPSGATGSPGSSTPSGATGSPGSSPSASTGTGPGSSPSASTGTGPGASPGTSSTGSPGTPGSGTASSSPGSSTPSGATGSPASSAPCNIQMEDPTFKENYRFHAINGYIMDTLPGLVMAQDQRIRWYLLSMGSNENIHSIHFSGHVFTVRKKEEYKMALYNLYPGVFETVEMLPSKAGIWRVECLIGEHLHAGMSTLFLVYSNKCQTPLGMASGHIRDFQITASGQYGQWAPKLARLHYSGSINAWSTKEPFSWIKVDLLAPMIIHGIKTQGARQKFSSLYISQFIIMYSLDGKKWQTYRGNSTGTLMVFFGNVDSSGIKHNIFNPPIIARYIRLHPTHYSIRSTLRMELMGCDLNSCSMPLGMESKAISDAQITASSYFTNMFATWSPSKARLHLQGRSNAWRPQVNNPKEWLQVDFQKTMKVTGVTTQGVKSLLTSMYVKEFLISSSQDGHQWTLFFQNGKVKVFQGNQDSFTPVVNSLDPPLLTRYLRIHPQSWVHQIALRMEVLGCEAQDLYGAGSPGAETAEQKLISEEDLSPATGHHHHHH

SEQ ID NO: 1400 - DNA, 5292 bp, synthetic construct
  misc_feature 1..5292: note = Description of Artificial Sequence: Synthetic polynucleotide
  source 1..5292: mol_type = other DNA
gccaccagaagatactacctgggtgcagtggaactgtcatgggactatatgcaaagtgatctcggtgagctgcctgtggacgcaagatttcctcctagagtgccaaaatcttttccattcaacacctcagtcgtgtacaaaaagactctgtttgtagaattcacggatcaccttttcaacatcgctaagccaaggccaccctggatgggtctgctaggtcctaccatccaggctgaggtttatgatacagtggtcattacacttaagaacatggcttcccatcctgtcagtcttcatgctgttggtgtatcctactggaaagcttctgagggagctgaatatgatgatcagaccagtcaaagggagaaagaagatgataaagtcttccctggtggaagccatacatatgtctggcaggtcctgaaagagaatggtccaatggcctctgacccactgtgccttacctactcatatctttctcatgtggacctggtaaaagacttgaattcaggcctcattggagccctactagtatgtagagaagggagtctggccaaggaaaagacacagaccttgcacaaatttatactactttttgctgtatttgatgaagggaaaagttggcactcagaaacaaagaactccttgatgcaggatagggatgctgcatctgctcgggcctggcctaaaatgcacacagtcaatggttatgtaaacaggtctctgccaggtctgattggatgccacaggaaatcagtctattggcatgtgattggaatgggcaccactcctgaagtgcactcaatattcctcgaaggtcacacatttcttgtgaggaaccatcgccaggctagcttggaaatctcgccaataactttccttactgctcaaacactcttgatggaccttggacagtttctactgttttgtcatatctcttcccaccaacatgatggcatggaagcttatgtcaaagtagacagctgtccagaggaaccccaactacgaatgaaaaataatgaagaagcggaagactatgatgatgatcttactgattctgaaatggatgtggtcaggtttgatgatgacaactctccttcctttatccaaattcgctcagttgccaagaagcatcctaaaacttgggtacattacattgctgctgaagaggaggactgggactatgctcccttagtcctcgcccccgatgacagaagttataaaagtcaatatttgaacaatggccctcagcggattggtaggaagtacaaaaaagtccgatttatggcatacacagatgaaacctttaagactcgtgaagctattcagcatgaatcaggaatcttgggacctttactttatggggaagttggagacacactgttgattatatttaagaatcaagcaagcagaccatataacatctaccctcacggaatcactgatgtccgtcctttgtattcaaggagattaccaaaaggtgtaaaacatttgaaggattttccaattctgccaggagaaatattcaaatataaatggacagtgactgtagaagatgggccaactaaatcagatcctcggtgcctgacccgctattactctagtttcgttaatatggagagagatctagcttcaggactcattggccctctcctcatctgctacaaagaatctgtagatcaaagaggaaaccagataatgtcagacaagaggaatgtcatcctgttttctgtatttgatgagaaccgaagctggtacctcacagagaatatacaacgctttctccccaatccagctggagtgcagcttgaggatccagagttccaagcctccaacatcatgcacagcatcaatggctatgtttttgatagtttgcagttgtcagtttgtttgcatgaggtggcatactggtacattctaagcattggagcacagactgacttcctttctgtcttcttctctggatataccttcaaacacaaaatggtctatgaagacacactcaccctattcccattctcaggagaaactgtcttcatgtcgatggaaaacccaggtctatggattctggggtgccacaactcagactttcggaacagaggcatgaccgccttactgaaggtttctagttgtgacaagaacactggtgattattacgaggacagttatgaagatatttcagcatacttgctgagtaaaaacaatgccattgaaccaagaagcttctctcaaaacccaccagtcttgaaacgccatcaacgggaaataactcgtactactcttcagtcagatcaagaggaaatcgattatgatgataccatatcagttgaaatgaagaaggaagattttgacatttatgatgaggatgaaaatcagagcccccgcagctttcaaaagaaaacacgacactattttattgctgcagtggagaggctctgggattatgggatgagtagctccccacatgttctaagaaacagggctcagagtggcagtgtccctcagttcaagaaagttgttttccaggaatttactgatggctcctttactcagcccttataccgtggagaactaaatgaacatttgggactcctggggccatatataagagcagaagttgaagataatatcatggtaactttcagaaatcaggcctctcgtccctattccttctattctagccttatttcttatgaggaagatcagaggcaaggagcagaacctagaaaaaactttgtcaagcctaatgaaaccaaaacttacttttggaaagtgcaacatcatatggcacccactaaagatgagtttgactgcaaagcctgggcttatttctctgatgttgacctggaaaaagatgtgcactcaggcctgattggaccccttctggtctgccacactaacacactgaaccctgctcatgggagacaagtgacagtacaggaatttgctctgtttttcaccatctttgatgagaccaaaagctggtacttcactgaaaatatggaaagaaactgcaggggcgcgccaggtacgcccgggtcgggaacagcgtcctcaagcccgggtagctcgacgccgtcaggagccacagggtcgccgggatcgtcgactccatcaggcgcaacgggatcgcctggatcaagcactccatccggagcgacgggaagcccagggagctccccgtccgcatcgactgggacgggacctggagcaagccccggtacgtcgtcaacaggttcgcctggtgcctcgcctggcacgtccagcacggggagccccggaacgccgggttccggaaccgcatcctcctcaccaggtgcctcaccgggcacctcatcaacgggatcaccaggggcttcaccgggaacgagctcgacgggttcaccgggagcgtccccggggacttcgtcgacaggtagcccaggggcaagccccggtacatcgtcaacgggttccccagggacaccggggagcggtactgcatcgtcctcacccggttcctcgacacccagcggagccacgggttcgcccggtactccggggtccggaacggccagcagctcacccggttcctcgacgccatcaggtgccacgggctcgcctggaacgccaggctcgggcactgcgagcagcagccctggatcatcaacgcctagcggagcgaccggctcccctggatcgtcaactccctcgggcgcgactgggagcccaggaagctcaccgtcggcctcgacgggaacagggcctggttcgagcccctcagcttcaacaggaacaggtccaggcgcgtcgccaggtacatcatcgacgggttcgcctgggacccctgggtccggtactgcctcatcatcgcccggatcgtccaccccctcgggagcgacaggttcgcctgcctcgagcgctccctgcaatatccagatggaagatcccacttttaaagagaattatcgcttccatgcaatcaatggctacataatggatacactacctggcttagtaatggctcaggatcaaaggattcgatggtatctgctcagcatgggcagcaatgaaaacatccattctattcatttcagtggacatgtgttcactgtacgaaaaaaagaggagtataaaatggcactgtacaatctctatccaggtgtttttgagacagtggaaatgttaccatccaaagctggaatttggcgggtggaatgccttattggcgagcatctacatgctgggatgagcacactttttctggtgtacagcaataagtgtcagactcccctgggaatggcttctggacacattagagattttcagattacagcttcaggacaatatggacagtgggccccaaagctggccagacttcattattccggatcaatcaatgcctggagcaccaaggagcccttttcttggatcaaggtggatctgttggcaccaatgattattcacggcatcaagacccagggtgcccgtcagaagttctccagcctctacatctctcagtttatcatcatgtatagtcttgatgggaagaagtggcagacttatcgaggaaattccactggaaccttaatggtcttctttggcaatgtggattcatctgggataaaacacaatatttttaaccctccaattattgctcgatacatccgtttgcacccaactcattatagcattcgcagcactcttcgcatggagttgatgggctgtgatttaaatagttgcagcatgccattgggaatggagagtaaagcaatatcagatgcacagattactgcttcatcctactttaccaatatgtttgccacctggtctccttcaaaagctcgacttcacctccaagggaggagtaatgcctggagacctcaggtgaataatccaaaagagtggctgcaagtggacttccagaagacaatgaaagtcacaggagtaactactcagggagtaaaatctctgcttaccagcatgtatgtgaaggagttcctcatctccagcagtcaagatggccatcagtggactctcttttttcagaatggcaaagtaaaggtttttcagggaaatcaagactccttcacacctgtggtgaactctctagacccaccgttactgactcgctaccttcgaattcacccccagagttgggtgcaccagattgccctgaggatggaggttctgggctgcgaggcacaggacctctacggcgccggatcacctggggccgaaacggccgaacaaaaactcatctcagaagaggatctgtcacctgcaaccggtcatcatcaccatcaccattga

SEQ ID NO: 1401 - protein, 1501 aa, synthetic construct
  REGION 1..1501: note = Description of Artificial Sequence: Synthetic polypeptide
ATRRYYLGAVELSWDYMQSDLGELPVDARFPPRVPKSFPFNTSVVYKKTLFVEFTDHLFNIAKPRPPWMGLLGPTIQAEVYDTVVITLKNMASHPVSLHAVGVSYWKASEGAEYDDQTSQREKEDDKVFPGGSHTYVWQVLKENGPMASDPLCLTYSYLSHVDLVKDLNSGLIGALLVCREGSLAKEKTQTLHKFILLFAVFDEGKSWHSETKNSLMQDRDAASARAWPKMHTVNGYVNRSLPGLIGCHRKSVYWHVIGMGTTPEVHSIFLEGHTFLVRNHRQASLEISPITFLTAQTLLMDLGQFLLFCHISSHQHDGMEAYVKVDSCPEEPQLRMKNNEEAEDYDDDLTDSEMDVVRFDDDNSPSFIQIRSVAKKHPKTWVHYIAAEEEDWDYAPLVLAPDDRSYKSQYLNNGPQRIGRKYKKVRFMAYTDETFKTREAIQHESGILGPLLYGEVGDTLLIIFKNQASRPYNIYPHGITDVRPLYSRRLPKGVKHLKDFPILPGEIFKYKWTVTVEDGPTKSDPRCLTRYYSSFVNMERDLASGLIGPLLICYKESVDQRGNQIMSDKRNVILFSVFDENRSWYLTENIQRFLPNPAGVQLEDPEFQASNIMHSINGYVFDSLQLSVCLHEVAYWYILSIGAQTDFLSVFFSGYTFKHKMVYEDTLTLFPFSGETVFMSMENPGLWILGCHNSDFRNRGMTALLKVSSCDKNTGDYYEDSYEDISAYLLSKNNAIEPRSFSQNPPVLKRHQREITRTTLQSDQEEIDYDDTISVEMKKEDFDIYDEDENQSPRSFQKKTRHYFIAAVERLWDYGMSSSPHVLRNRAQSGSVPQFKKVVFQEFTDGSFTQPLYRGELNEHLGLLGPYIRAEVEDNIMVTFRNQASRPYSFYSSLISYEEDQRQGAEPRKNFVKPNETKTYFWKVQHHMAPTKDEFDCKAWAYFSDVDLEKDVHSGLIGPLLVCHTNTLNPAHGRQVTVQEFALFFTIFDETKSWYFTENMERNCRAPCNIQMEDPTFKENYRFHAINGYIMDTLPGLVMAQDQRIRWYLLSMGSNENIHSIHFSGHVFTVRKKEEYKMALYNLYPGVFETVEMLPSKAGIWRVECLIGEHLHAGMSTLFLVYSNKCQTPLGMASGHIRDFQITASGQYGQWAPKLARLHYSGSINAWSTKEPFSWIKVDLLAPMIIHGIKTQGARQKFSSLYISQFIIMYSLDGKKWQTYRGNSTGTLMVFFGNVDSSGIKHNIFNPPIIARYIRLHPTHYSIRSTLRMELMGCDLNSCSMPLGMESKAISDAQITASSYFTNMFATWSPSKARLHLQGRSNAWRPQVNNPKEWLQVDFQKTMKVTGVTTQGVKSLLTSMYVKEFLISSSQDGHQWTLFFQNGKVKVFQGNQDSFTPVVNSLDPPLLTRYLRIHPQSWVHQIALRMEVLGCEAQDLYGAPGSPAGSPTSTEEGTSESATPESGPGSEPATSGSETPASSEQKLISEEDLSPATGHHHHHH

SEQ ID NO: 1402 - DNA, 4506 bp, synthetic construct
  misc_feature 1..4506: note = Description of Artificial Sequence: Synthetic polynucleotide
  source 1..4506: mol_type = other DNA
gccaccagaagatactacctgggtgcagtggaactgtcatgggactatatgcaaagtgatctcggtgagctgcctgtggacgcaagatttcctcctagagtgccaaaatcttttccattcaacacctcagtcgtgtacaaaaagactctgtttgtagaattcacggatcaccttttcaacatcgctaagccaaggccaccctggatgggtctgctaggtcctaccatccaggctgaggtttatgatacagtggtcattacacttaagaacatggcttcccatcctgtcagtcttcatgctgttggtgtatcctactggaaagcttctgagggagctgaatatgatgatcagaccagtcaaagggagaaagaagatgataaagtcttccctggtggaagccatacatatgtctggcaggtcctgaaagagaatggtccaatggcctctgacccactgtgccttacctactcatatctttctcatgtggacctggtaaaagacttgaattcaggcctcattggagccctactagtatgtagagaagggagtctggccaaggaaaagacacagaccttgcacaaatttatactactttttgctgtatttgatgaagggaaaagttggcactcagaaacaaagaactccttgatgcaggatagggatgctgcatctgctcgggcctggcctaaaatgcacacagtcaatggttatgtaaacaggtctctgccaggtctgattggatgccacaggaaatcagtctattggcatgtgattggaatgggcaccactcctgaagtgcactcaatattcctcgaaggtcacacatttcttgtgaggaaccatcgccaggctagcttggaaatctcgccaataactttccttactgctcaaacactcttgatggaccttggacagtttctactgttttgtcatatctcttcccaccaacatgatggcatggaagcttatgtcaaagtagacagctgtccagaggaaccccaactacgaatgaaaaataatgaagaagcggaagactatgatgatgatcttactgattctgaaatggatgtggtcaggtttgatgatgacaactctccttcctttatccaaattcgctcagttgccaagaagcatcctaaaacttgggtacattacattgctgctgaagaggaggactgggactatgctcccttagtcctcgcccccgatgacagaagttataaaagtcaatatttgaacaatggccctcagcggattggtaggaagtacaaaaaagtccgatttatggcatacacagatgaaacctttaagactcgtgaagctattcagcatgaatcaggaatcttgggacctttactttatggggaagttggagacacactgttgattatatttaagaatcaagcaagcagaccatataacatctaccctcacggaatcactgatgtccgtcctttgtattcaaggagattaccaaaaggtgtaaaacatttgaaggattttccaattctgccaggagaaatattcaaatataaatggacagtgactgtagaagatgggccaactaaatcagatcctcggtgcctgacccgctattactctagtttcgttaatatggagagagatctagcttcaggactcattggccctctcctcatctgctacaaagaatctgtagatcaaagaggaaaccagataatgtcagacaagaggaatgtcatcctgttttctgtatttgatgagaaccgaagctggtacctcacagagaatatacaacgctttctccccaatccagctggagtgcagcttgaggatccagagttccaagcctccaacatcatgcacagcatcaatggctatgtttttgatagtttgcagttgtcagtttgtttgcatgaggtggcatactggtacattctaagcattggagcacagactgacttcctttctgtcttcttctctggatataccttcaaacacaaaatggtctatgaagacacactcaccctattcccattctcaggagaaactgtcttcatgtcgatggaaaacccaggtctatggattctggggtgccacaactcagactttcggaacagaggcatgaccgccttactgaaggtttctagttgtgacaagaacactggtgattattacgaggacagttatgaagatatttcagcatacttgctgagtaaaaacaatgccattgaaccaagaagcttctctcaaaacccaccagtcttgaaacgccatcaacgggaaataactcgtactactcttcagtcagatcaagaggaaatcgattatgatgataccatatcagttgaaatgaagaaggaagattttgacatttatgatgaggatgaaaatcagagcccccgcagctttcaaaagaaaacacgacactattttattgctgcagtggagaggctctgggattatgggatgagtagctccccacatgttctaagaaacagggctcagagtggcagtgtccctcagttcaagaaagttgttttccaggaatttactgatggctcctttactcagcccttataccgtggagaactaaatgaacatttgggactcctggggccatatataagagcagaagttgaagataatatcatggtaactttcagaaatcaggcctctcgtccctattccttctattctagccttatttcttatgaggaagatcagaggcaaggagcagaacctagaaaaaactttgtcaagcctaatgaaaccaaaacttacttttggaaagtgcaacatcatatggcacccactaaagatgagtttgactgcaaagcctgggcttatttctctgatgttgacctggaaaaagatgtgcactcaggcctgattggaccccttctggtctgccacactaacacactgaaccctgctcatgggagacaagtgacagtacaggaatttgctctgtttttcaccatctttgatgagaccaaaagctggtacttcactgaaaatatggaaagaaactgcagggctccctgcaatatccagatggaagatcccacttttaaagagaattatcgcttccatgcaatcaatggctacataatggatacactacctggcttagtaatggctcaggatcaaaggattcgatggtatctgctcagcatgggcagcaatgaaaacatccattctattcatttcagtggacatgtgttcactgtacgaaaaaaagaggagtataaaatggcactgtacaatctctatccaggtgtttttgagacagtggaaatgttaccatccaaagctggaatttggcgggtggaatgccttattggcgagcatctacatgctgggatgagcacactttttctggtgtacagcaataagtgtcagactcccctgggaatggcttctggacacattagagattttcagattacagcttcaggacaatatggacagtgggccccaaagctggccagacttcattattccggatcaatcaatgcctggagcaccaaggagcccttttcttggatcaaggtggatctgttggcaccaatgattattcacggcatcaagacccagggtgcccgtcagaagttctccagcctctacatctctcagtttatcatcatgtatagtcttgatgggaagaagtggcagacttatcgaggaaattccactggaaccttaatggtcttctttggcaatgtggattcatctgggataaaacacaatatttttaaccctccaattattgctcgatacatccgtttgcacccaactcattatagcattcgcagcactcttcgcatggagttgatgggctgtgatttaaatagttgcagcatgccattgggaatggagagtaaagcaatatcagatgcacagattactgcttcatcctactttaccaatatgtttgccacctggtctccttcaaaagctcgacttcacctccaagggaggagtaatgcctggagacctcaggtgaataatccaaaagagtggctgcaagtggacttccagaagacaatgaaagtcacaggagtaactactcagggagtaaaatctctgcttaccagcatgtatgtgaaggagttcctcatctccagcagtcaagatggccatcagtggactctcttttttcagaatggcaaagtaaaggtttttcagggaaatcaagactccttcacacctgtggtgaactctctagacccaccgttactgactcgctaccttcgaattcacccccagagttgggtgcaccagattgccctgaggatggaggttctgggctgcgaggcacaggacctctacggcgcgccaggttctcctgctggctcccccacctcaacagaagaggggacaagcgaaagcgctacgcctgagagtggccctggctctgagccagccacctccggctctgaaacccctgcctcgagcgaacaaaaactcatctcagaagaggatctgtcacctgcaaccggtcatcatcaccatcaccattga

SEQ ID NO: 1403 - protein, 1553 aa, synthetic construct
  REGION 1..1553: note = Description of Artificial Sequence: Synthetic polypeptide
ATRRYYLGAVELSWDYMQSDLGELPVDARFPPRVPKSFPFNTSVVYKKTLFVEFTDHLFNIAKPRPPWMGLLGPTIQAEVYDTVVITLKNMASHPVSLHAVGVSYWKASEGAEYDDQTSQREKEDDKVFPGGSHTYVWQVLKENGPMASDPLCLTYSYLSHVDLVKDLNSGLIGALLVCREGSLAKEKTQTLHKFILLFAVFDEGKSWHSETKNSLMQDRDAASARAWPKMHTVNGYVNRSLPGLIGCHRKSVYWHVIGMGTTPEVHSIFLEGHTFLVRNHRQASLEISPITFLTAQTLLMDLGQFLLFCHISSHQHDGMEAYVKVDSCPEEPQLRMKNNEEAEDYDDDLTDSEMDVVRFDDDNSPSFIQIRSVAKKHPKTWVHYIAAEEEDWDYAPLVLAPDDRSYKSQYLNNGPQRIGRKYKKVRFMAYTDETFKTREAIQHESGILGPLLYGEVGDTLLIIFKNQASRPYNIYPHGITDVRPLYSRRLPKGVKHLKDFPILPGEIFKYKWTVTVEDGPTKSDPRCLTRYYSSFVNMERDLASGLIGPLLICYKESVDQRGNQIMSDKRNVILFSVFDENRSWYLTENIQRFLPNPAGVQLEDPEFQASNIMHSINGYVFDSLQLSVCLHEVAYWYILSIGAQTDFLSVFFSGYTFKHKMVYEDTLTLFPFSGETVFMSMENPGLWILGCHNSDFRNRGMTALLKVSSCDKNTGDYYEDSYEDISAYLLSKNNAIEPRSFSQNGAPGSPAGSPTSTEEGTSESATPESGPGSEPATSGSETPASSPPVLKRHQAEITRTTLQSDQEEIDYDDTISVEMKKEDFDIYDEDENQSPRSFQKKTRHYFIAAVERLWDYGMSSSPHVLRNRAQSGSVPQFKKVVFQEFTDGSFTQPLYRGELNEHLGLLGPYIRAEVEDNIMVTFRNQASRPYSFYSSLISYEEDQRQGAEPRKNFVKPNETKTYFWKVQHHMAPTKDEFDCKAWAYFSDVDLEKDVHSGLIGPLLVCHTNTLNPAHGRQVTVQEFALFFTIFDETKSWYFTENMERNCRGAPGSPAGSPTSTEEGTSESATPESGPGSEPATSGSETPASSAPCNIQMEDPTFKENYRFHAINGYIMDTLPGLVMAQDQRIRWYLLSMGSNENIHSIHFSGHVFTVRKKEEYKMALYNLYPGVFETVEMLPSKAGIWRVECLIGEHLHAGMSTLFLVYSNKCQTPLGMASGHIRDFQITASGQYGQWAPKLARLHYSGSINAWSTKEPFSWIKVDLLAPMIIHGIKTQGARQKFSSLYISQFIIMYSLDGKKWQTYRGNSTGTLMVFFGNVDSSGIKHNIFNPPIIARYIRLHPTHYSIRSTLRMELMGCDLNSCSMPLGMESKAISDAQITASSYFTNMFATWSPSKARLHLQGRSNAWRPQVNNPKEWLQVDFQKTMKVTGVTTQGVKSLLTSMYVKEFLISSSQDGHQWTLFFQNGKVKVFQGNQDSFTPVVNSLDPPLLTRYLRIHPQSWVHQIALRMEVLGCEAQDLYGAGSPGAETAEQKLISEEDLSPATGHHHHHH

SEQ ID NO: 1404 - DNA, 4662 bp, synthetic construct
  misc_feature 1..4662: note = Description of Artificial Sequence: Synthetic polynucleotide
  source 1..4662: mol_type = other DNA
gccaccagaagatactacctgggtgcagtggaactgtcatgggactatatgcaaagtgatctcggtgagctgcctgtggacgcaagatttcctcctagagtgccaaaatcttttccattcaacacctcagtcgtgtacaaaaagactctgtttgtagaattcacggatcaccttttcaacatcgctaagccaaggccaccctggatgggtctgctaggtcctaccatccaggctgaggtttatgatacagtggtcattacacttaagaacatggcttcccatcctgtcagtcttcatgctgttggtgtatcctactggaaagcttctgagggagctgaatatgatgatcagaccagtcaaagggagaaagaagatgataaagtcttccctggtggaagccatacatatgtctggcaggtcctgaaagagaatggtccaatggcctctgacccactgtgccttacctactcatatctttctcatgtggacctggtaaaagacttgaattcaggcctcattggagccctactagtatgtagagaagggagtctggccaaggaaaagacacagaccttgcacaaatttatactactttttgctgtatttgatgaagggaaaagttggcactcagaaacaaagaactccttgatgcaggatagggatgctgcatctgctcgggcctggcctaaaatgcacacagtcaatggttatgtaaacaggtctctgccaggtctgattggatgccacaggaaatcagtctattggcatgtgattggaatgggcaccactcctgaagtgcactcaatattcctcgaaggtcacacatttcttgtgaggaaccatcgccaggctagcttggaaatctcgccaataactttccttactgctcaaacactcttgatggaccttggacagtttctactgttttgtcatatctcttcccaccaacatgatggcatggaagcttatgtcaaagtagacagctgtccagaggaaccccaactacgaatgaaaaataatgaagaagcggaagactatgatgatgatcttactgattctgaaatggatgtggtcaggtttgatgatgacaactctccttcctttatccaaattcgctcagttgccaagaagcatcctaaaacttgggtacattacattgctgctgaagaggaggactgggactatgctcccttagtcctcgcccccgatgacagaagttataaaagtcaatatttgaacaatggccctcagcggattggtaggaagtacaaaaaagtccgatttatggcatacacagatgaaacctttaagactcgtgaagctattcagcatgaatcaggaatcttgggacctttactttatggggaagttggagacacactgttgattatatttaagaatcaagcaagcagaccatataacatctaccctcacggaatcactgatgtccgtcctttgtattcaaggagattaccaaaaggtgtaaaacatttgaaggattttccaattctgccaggagaaatattcaaatataaatggacagtgactgtagaagatgggccaactaaatcagatcctcggtgcctgacccgctattactctagtttcgttaatatggagagagatctagcttcaggactcattggccctctcctcatctgctacaaagaatctgtagatcaaagaggaaaccagataatgtcagacaagaggaatgtcatcctgttttctgtatttgatgagaaccgaagctggtacctcacagagaatatacaacgctttctccccaatccagctggagtgcagcttgaggatccagagttccaagcctccaacatcatgcacagcatcaatggctatgtttttgatagtttgcagttgtcagtttgtttgcatgaggtggcatactggtacattctaagcattggagcacagactgacttcctttctgtcttcttctctggatataccttcaaacacaaaatggtctatgaagacacactcaccctattcccattctcaggagaaactgtcttcatgtcgatggaaaacccaggtctatggattctggggtgccacaactcagactttcggaacagaggcatgaccgccttactgaaggtttctagttgtgacaagaacactggtgattattacgaggacagttatgaagatatttcagcatacttgctgagtaaaaacaatgccattgaaccaagaagcttctctcaaaacggcgcgccaggttctcctgctggctcccccacctcaacagaagaggggacaagcgaaagcgctacgcctgagagtggccctggctctgagccagccacctccggctctgaaacccctgcctcgagcccaccagtcttgaaacgccatcaagctgaaataactcgtactactcttcagtcagatcaagaggaaatcgattatgatgataccatatcagttgaaatgaagaaggaagattttgacatttatgatgaggatgaaaatcagagcccccgcagctttcaaaagaaaacacgacactattttattgctgcagtggagaggctctgggattatgggatgagtagctccccacatgttctaagaaacagggctcagagtggcagtgtccctcagttcaagaaagttgttttccaggaatttactgatggctcctttactcagcccttataccgtggagaactaaatgaacatttgggactcctggggccatatataagagcagaagttgaagataatatcatggtaactttcagaaatcaggcctctcgtccctattccttctattctagccttatttcttatgaggaagatcagaggcaaggagcagaacctagaaaaaactttgtcaagcctaatgaaaccaaaacttacttttggaaagtgcaacatcatatggcacccactaaagatgagtttgactgcaaagcctgggcttatttctctgatgttgacctggaaaaagatgtgcactcaggcctgattggaccccttctggtctgccacactaacacactgaaccctgctcatgggagacaagtgacagtacaggaatttgctctgtttttcaccatctttgatgagaccaaaagctggtacttcactgaaaatatggaaagaaactgcaggggcgcgccaggttctcctgctggctcccccacctcaacagaagaggggacaagcgaaagcgctacgcctgagagtggccctggctctgagccagccacctccggctctgaaacccctgcctcgagcgctccctgcaatatccagatggaagatcccacttttaaagagaattatcgcttccatgcaatcaatggctacataatggatacactacctggcttagtaatggctcaggatcaaaggattcgatggtatctgctcagcatgggcagcaatgaaaacatccattctattcatttcagtggacatgtgttcactgtacgaaaaaaagaggagtataaaatggcactgtacaatctctatccaggtgtttttgagacagtggaaatgttaccatccaaagctggaatttggcgggtggaatgccttattggcgagcatctacatgctgggatgagcacactttttctggtgtacagcaataagtgtcagactcccctgggaatggcttctggacacattagagattttcagattacagcttcaggacaatatggacagtgggccccaaagctggccagacttcattattccggatcaatcaatgcctggagcaccaaggagcccttttcttggatcaaggtggatctgttggcaccaatgattattcacggcatcaagacccagggtgcccgtcagaagttctccagcctctacatctctcagtttatcatcatgtatagtcttgatgggaagaagtggcagacttatcgaggaaattccactggaaccttaatggtcttctttggcaatgtggattcatctgggataaaacacaatatttttaaccctccaattattgctcgatacatccgtttgcacccaactcattatagcattcgcagcactcttcgcatggagttgatgggctgtgatttaaatagttgcagcatgccattgggaatggagagtaaagcaatatcagatgcacagattactgcttcatcctactttaccaatatgtttgccacctggtctccttcaaaagctcgacttcacctccaagggaggagtaatgcctggagacctcaggtgaataatccaaaagagtggctgcaagtggacttccagaagacaatgaaagtcacaggagtaactactcagggagtaaaatctctgcttaccagcatgtatgtgaaggagttcctcatctccagcagtcaagatggccatcagtggactctcttttttcagaatggcaaagtaaaggtttttcagggaaatcaagactccttcacacctgtggtgaactctctagacccaccgttactgactcgctaccttcgaattcacccccagagttgggtgcaccagattgccctgaggatggaggttctgggctgcgaggcacaggacctctacggcgccggatcacctggggccgaaacggccgaacaaaaactcatctcagaagaggatctgtcacctgcaaccggtcatcatcaccatcaccattga

SEQ ID NO: 1405 - protein, 1661 aa, synthetic construct
  REGION 1..1661: note = Description of Artificial Sequence: Synthetic polypeptide
ATRRYYLGAVELSWDYMQSDLGELPVDARFPPRVPKSFPFNTSVVYKKTLFVEFTDHLFNIAKPRPPWMGLLGPTIQAEVYDTVVITLKNMASHPVSLHAVGVSYWKASEGAEYDDQTSQREKEDDKVFPGGSHTYVWQVLKENGPMASDPLCLTYSYLSHVDLVKDLNSGLIGALLVCREGSLAKEKTQTLHKFILLFAVFDEGKSWHSETKNSLMQDRDAASARAWPKMHTVNGYVNRSLPGLIGCHRKSVYWHVIGMGTTPEVHSIFLEGHTFLVRNHRQASLEISPITFLTAQTLLMDLGQFLLFCHISSHQHDGMEAYVKVDSCPEEPQLRMKNNEEAEDYDDDLTDSEMDVVRFDDDNSPSFIQIRSVAKKHPKTWVHYIAAEEEDWDYAPLVLAPDDRSYKSQYLNNGPQRIGRKYKKVRFMAYTDETFKTREAIQHESGILGPLLYGEVGDTLLIIFKNQASRPYNIYPHGITDVRPLYSRRLPKGVKHLKDFPILPGEIFKYKWTVTVEDGPTKSDPRCLTRYYSSFVNMERDLASGLIGPLLICYKESVDQRGNQIMSDKRNVILFSVFDENRSWYLTENIQRFLPNPAGVQLEDPEFQASNIMHSINGYVFDSLQLSVCLHEVAYWYILSIGAQTDFLSVFFSGYTFKHKMVYEDTLTLFPFSGETVFMSMENPGLWILGCHNSDFRNRGMTALLKVSSCDKNTGDYYEDSYEDISAYLLSKNNAIEPRSFSQNGAPGSPAGSPTSTEEGTSESATPESGPGSEPATSGSETPASSPPVLKRHQAEITRTTLQSDQEEIDYDDTISVEMKKEDFDIYDEDENQSPRSFQKKTRHYFIAAVERLWDYGMSSSPHVLRNRAQSGSVPQFKKVVFQEFTDGSFTQPLYRGELNEHLGLLGPYIRAEVEDNIMVTFRNQASRPYSFYSSLISYEEDQRQGAEPRKNFVKPNETKTYFWKVQHHMAPTKDEFDCKAWAYFSDVDLEKDVHSGLIGPLLVCHTNTLNPAHGRQVTVQEFALFFTIFDETKSWYFTENMERNCRGAPGTPGSGTASSSPGASPGTSSTGSPGASPGTSSTGSPGASPGTSSTGSPGSSPSASTGTGPGTPGSGTASSSPGASPGTSSTGSPGASPGTSSTGSPGASPGTSSTGSPGSSTPSGATGSPGSSTPSGATGSPGASPGTSSTGSPASSAPCNIQMEDPTFKENYRFHAINGYIMDTLPGLVMAQDQRIRWYLLSMGSNENIHSIHFSGHVFTVRKKEEYKMALYNLYPGVFETVEMLPSKAGIWRVECLIGEHLHAGMSTLFLVYSNKCQTPLGMASGHIRDFQITASGQYGQWAPKLARLHYSGSINAWSTKEPFSWIKVDLLAPMIIHGIKTQGARQKFSSLYISQFIIMYSLDGKKWQTYRGNSTGTLMVFFGNVDSSGIKHNIFNPPIIARYIRLHPTHYSIRSTLRMELMGCDLNSCSMPLGMESKAISDAQITASSYFTNMFATWSPSKARLHLQGRSNAWRPQVNNPKEWLQVDFQKTMKVTGVTTQGVKSLLTSMYVKEFLISSSQDGHQWTLFFQNGKVKVFQGNQDSFTPVVNSLDPPLLTRYLRIHPQSWVHQIALRMEVLGCEAQDLYGAGSPGAETAEQKLISEEDLSPATGHHHHHH

SEQ ID NO: 1406 - DNA, 4986 bp, synthetic construct
  misc_feature 1..4986: note = Description of Artificial Sequence: Synthetic polynucleotide
  source 1..4986: mol_type = other DNA
gccaccagaagatactacctgggtgcagtggaactgtcatgggactatatgcaaagtgatctcggtgagctgcctgtggacgcaagatttcctcctagagtgccaaaatcttttccattcaacacctcagtcgtgtacaaaaagactctgtttgtagaattcacggatcaccttttcaacatcgctaagccaaggccaccctggatgggtctgctaggtcctaccatccaggctgaggtttatgatacagtggtcattacacttaagaacatggcttcccatcctgtcagtcttcatgctgttggtgtatcctactggaaagcttctgagggagctgaatatgatgatcagaccagtcaaagggagaaagaagatgataaagtcttccctggtggaagccatacatatgtctggcaggtcctgaaagagaatggtccaatggcctctgacccactgtgccttacctactcatatctttctcatgtggacctggtaaaagacttgaattcaggcctcattggagccctactagtatgtagagaagggagtctggccaaggaaaagacacagaccttgcacaaatttatactactttttgctgtatttgatgaagggaaaagttggcactcagaaacaaagaactccttgatgcaggatagggatgctgcatctgctcgggcctggcctaaaatgcacacagtcaatggttatgtaaacaggtctctgccaggtctgattggatgccacaggaaatcagtctattggcatgtgattggaatgggcaccactcctgaagtgcactcaatattcctcgaaggtcacacatttcttgtgaggaaccatcgccaggctagcttggaaatctcgccaataactttccttactgctcaaacactcttgatggaccttggacagtttctactgttttgtcatatctcttcccaccaacatgatggcatggaagcttatgtcaaagtagacagctgtccagaggaaccccaactacgaatgaaaaataatgaagaagcggaagactatgatgatgatcttactgattctgaaatggatgtggtcaggtttgatgatgacaactctccttcctttatccaaattcgctcagttgccaagaagcatcctaaaacttgggtacattacattgctgctgaagaggaggactgggactatgctcccttagtcctcgcccccgatgacagaagttataaaagtcaatatttgaacaatggccctcagcggattggtaggaagtacaaaaaagtccgatttatggcatacacagatgaaacctttaagactcgtgaagctattcagcatgaatcaggaatcttgggacctttactttatggggaagttggagacacactgttgattatatttaagaatcaagcaagcagaccatataacatctaccctcacggaatcactgatgtccgtcctttgtattcaaggagattaccaaaaggtgtaaaacatttgaaggattttccaattctgccaggagaaatattcaaatataaatggacagtgactgtagaagatgggccaactaaatcagatcctcggtgcctgacccgctattactctagtttcgttaatatggagagagatctagcttcaggactcattggccctctcctcatctgctacaaagaatctgtagatcaaagaggaaaccagataatgtcagacaagaggaatgtcatcctgttttctgtatttgatgagaaccgaagctggtacctcacagagaatatacaacgctttctccccaatccagctggagtgcagcttgaggatccagagttccaagcctccaacatcatgcacagcatcaatggctatgtttttgatagtttgcagttgtcagtttgtttgcatgaggtggcatactggtacattctaagcattggagcacagactgacttcctttctgtcttcttctctggatataccttcaaacacaaaatggtctatgaagacacactcaccctattcccattctcaggagaaactgtcttcatgtcgatggaaaacccaggtctatggattctggggtgccacaactcagactttcggaacagaggcatgaccgccttactgaaggtttctagttgtgacaagaacactggtgattattacgaggacagttatgaagatatttcagcatacttgctgagtaaaaacaatgccattgaaccaagaagcttctctcaaaacggcgcgccaggttctcctgctggctcccccacctcaacagaagaggggacaagcgaaagcgctacgcctgagagtggccctggctctgagccagccacctccggctctgaaacccctgcctcgagcccaccagtcttgaaacgccatcaagctgaaataactcgtactactcttcagtcagatcaagaggaaatcgattatgatgataccatatcagttgaaatgaagaaggaagattttgacatttatgatgaggatgaaaatcagagcccccgcagctttcaaaagaaaacacgacactattttattgctgcagtggagaggctctgggattatgggatgagtagctccccacatgttctaagaaacagggctcagagtggcagtgtccctcagttcaagaaagttgttttccaggaatttactgatggctcctttactcagcccttataccgtggagaactaaatgaacatttgggactcctggggccatatataagagcagaagttgaagataatatcatggtaactttcagaaatcaggcctctcgtccctattccttctattctagccttatttcttatgaggaagatcagaggcaaggagcagaacctagaaaaaactttgtcaagcctaatgaaaccaaaacttacttttggaaagtgcaacatcatatggcacccactaaagatgagtttgactgcaaagcctgggcttatttctctgatgttgacctggaaaaagatgtgcactcaggcctgattggaccccttctggtctgccacactaacacactgaaccctgctcatgggagacaagtgacagtacaggaatttgctctgtttttcaccatctttgatgagaccaaaagctggtacttcactgaaaatatggaaagaaactgcaggggcgcgccaggtacacccggatcgggtacagcgtcatcgagccccggtgcgtcacctggtacgtcgagcacggggtcgccaggggcgtcccctgggacgtcctcaacaggctcgcccggtgcgtcacccggcacgtcgtccacgggttcacctggtagctccccttccgcgtccactggcaccgggcctggaactccggggagcggcacagcgagctcgtcgccgggagcatcgcctgggacatcgagcaccgggtcgccaggagcatcgcccggaacatccagcacaggaagccccggcgcgtcgcccgggacatcaagcacaggttccccgggatcgagcacgccgtccggagccactggatcaccagggagctcgacaccttccggcgcaacgggatcgcccggagccagcccgggtacgtcaagcactggctcccctgcctcgagcgctccctgcaatatccagatggaagatcccacttttaaagagaattatcgcttccatgcaatcaatggctacataatggatacactacctggcttagtaatggctcaggatcaaaggattcgatggtatctgctcagcatgggcagcaatgaaaacatccattctattcatttcagtggacatgtgttcactgtacgaaaaaaagaggagtataaaatggcactgtacaatctctatccaggtgtttttgagacagtggaaatgttaccatccaaagctggaatttggcgggtggaatgccttattggcgagcatctacatgctgggatgagcacactttttctggtgtacagcaataagtgtcagactcccctgggaatggcttctggacacattagagattttcagattacagcttcaggacaatatggacagtgggccccaaagctggccagacttcattattccggatcaatcaatgcctggagcaccaaggagcccttttcttggatcaaggtggatctgttggcaccaatgattattcacggcatcaagacccagggtgcccgtcagaagttctccagcctctacatctctcagtttatcatcatgtatagtcttgatgggaagaagtggcagacttatcgaggaaattccactggaaccttaatggtcttctttggcaatgtggattcatctgggataaaacacaatatttttaaccctccaattattgctcgatacatccgtttgcacccaactcattatagcattcgcagcactcttcgcatggagttgatgggctgtgatttaaatagttgcagcatgccattgggaatggagagtaaagcaatatcagatgcacagattactgcttcatcctactttaccaatatgtttgccacctggtctccttcaaaagctcgacttcacctccaagggaggagtaatgcctggagacctcaggtgaataatccaaaagagtggctgcaagtggacttccagaagacaatgaaagtcacaggagtaactactcagggagtaaaatctctgcttaccagcatgtatgtgaaggagttcctcatctccagcagtcaagatggccatcagtggactctcttttttcagaatggcaaagtaaaggtttttcagggaaatcaagactccttcacacctgtggtgaactctctagacccaccgttactgactcgctaccttcgaattcacccccagagttgggtgcaccagattgccctgaggatggaggttctgggctgcgaggcacaggacctctacggcgccggatcacctggggccgaaacggccgaacaaaaactcatctcagaagaggatctgtcacctgcaaccggtcatcatcaccatcaccattga

SEQ ID NO: 1407 - protein, 1805 aa, synthetic construct
  REGION 1..1805: note = Description of Artificial Sequence: Synthetic polypeptide
ATRRYYLGAVELSWDYMQSDLGELPVDARFPPRVPKSFPFNTSVVYKKTLFVEFTDHLFNIAKPRPPWMGLLGPTIQAEVYDTVVITLKNMASHPVSLHAVGVSYWKASEGAEYDDQTSQREKEDDKVFPGGSHTYVWQVLKENGPMASDPLCLTYSYLSHVDLVKDLNSGLIGALLVCREGSLAKEKTQTLHKFILLFAVFDEGKSWHSETKNSLMQDRDAASARAWPKMHTVNGYVNRSLPGLIGCHRKSVYWHVIGMGTTPEVHSIFLEGHTFLVRNHRQASLEISPITFLTAQTLLMDLGQFLLFCHISSHQHDGMEAYVKVDSCPEEPQLRMKNNEEAEDYDDDLTDSEMDVVRFDDDNSPSFIQIRSVAKKHPKTWVHYIAAEEEDWDYAPLVLAPDDRSYKSQYLNNGPQRIGRKYKKVRFMAYTDETFKTREAIQHESGILGPLLYGEVGDTLLIIFKNQASRPYNIYPHGITDVRPLYSRRLPKGVKHLKDFPILPGEIFKYKWTVTVEDGPTKSDPRCLTRYYSSFVNMERDLASGLIGPLLICYKESVDQRGNQIMSDKRNVILFSVFDENRSWYLTENIQRFLPNPAGVQLEDPEFQASNIMHSINGYVFDSLQLSVCLHEVAYWYILSIGAQTDFLSVFFSGYTFKHKMVYEDTLTLFPFSGETVFMSMENPGLWILGCHNSDFRNRGMTALLKVSSCDKNTGDYYEDSYEDISAYLLSKNNAIEPRSFSQNGAPGSPAGSPTSTEEGTSESATPESGPGSEPATSGSETPASSPPVLKRHQAEITRTTLQSDQEEIDYDDTISVEMKKEDFDIYDEDENQSPRSFQKKTRHYFIAAVERLWDYGMSSSPHVLRNRAQSGSVPQFKKVVFQEFTDGSFTQPLYRGELNEHLGLLGPYIRAEVEDNIMVTFRNQASRPYSFYSSLISYEEDQRQGAEPRKNFVKPNETKTYFWKVQHHMAPTKDEFDCKAWAYFSDVDLEKDVHSGLIGPLLVCHTNTLNPAHGRQVTVQEFALFFTIFDETKSWYFTENMERNCRGAPGTPGSGTASSSPGSSTPSGATGSPGSSTPSGATGSPGSSTPSGATGSPGSSPSASTGTGPGASPGTSSTGSPGASPGTSSTGSPGTPGSGTASSSPGASPGTSSTGSPGASPGTSSTGSPGASPGTSSTGSPGASPGTSSTGSPGTPGSGTASSSPGSSTPSGATGSPGTPGSGTASSSPGSSTPSGATGSPGTPGSGTASSSPGSSTPSGATGSPGSSTPSGATGSPGSSPSASTGTGPGSSPSASTGTGPGASPGTSSTGSPGTPGSGTASSSPGSSTPSGATGSPASSAPCNIQMEDPTFKENYRFHAINGYIMDTLPGLVMAQDQRIRWYLLSMGSNENIHSIHFSGHVFTVRKKEEYKMALYNLYPGVFETVEMLPSKAGIWRVECLIGEHLHAGMSTLFLVYSNKCQTPLGMASGHIRDFQITASGQYGQWAPKLARLHYSGSINAWSTKEPFSWIKVDLLAPMIIHGIKTQGARQKFSSLYISQFIIMYSLDGKKWQTYRGNSTGTLMVFFGNVDSSGIKHNIFNPPIIARYIRLHPTHYSIRSTLRMELMGCDLNSCSMPLGMESKAISDAQITASSYFTNMFATWSPSKARLHLQGRSNAWRPQVNNPKEWLQVDFQKTMKVTGVTTQGVKSLLTSMYVKEFLISSSQDGHQWTLFFQNGKVKVFQGNQDSFTPVVNSLDPPLLTRYLRIHPQSWVHQIALRMEVLGCEAQDLYGAGSPGAETAEQKLISEEDLSPATGHHHHHH

SEQ ID NO: 1408 - DNA, 5418 bp, synthetic construct
  misc_feature 1..5418: note = Description of Artificial Sequence: Synthetic polynucleotide
  source 1..5418: mol_type = other DNA
gccaccagaagatactacctgggtgcagtggaactgtcatgggactatatgcaaagtgatctcggtgagctgcctgtggacgcaagatttcctcctagagtgccaaaatcttttccattcaacacctcagtcgtgtacaaaaagactctgtttgtagaattcacggatcaccttttcaacatcgctaagccaaggccaccctggatgggtctgctaggtcctaccatccaggctgaggtttatgatacagtggtcattacacttaagaacatggcttcccatcctgtcagtcttcatgctgttggtgtatcctactggaaagcttctgagggagctgaatatgatgatcagaccagtcaaagggagaaagaagatgataaagtcttccctggtggaagccatacatatgtctggcaggtcctgaaagagaatggtccaatggcctctgacccactgtgccttacctactcatatctttctcatgtggacctggtaaaagacttgaattcaggcctcattggagccctactagtatgtagagaagggagtctggccaaggaaaagacacagaccttgcacaaatttatactactttttgctgtatttgatgaagggaaaagttggcactcagaaacaaagaactccttgatgcaggatagggatgctgcatctgctcgggcctggcctaaaatgcacacagtcaatggttatgtaaacaggtctctgccaggtctgattggatgccacaggaaatcagtctattggcatgtgattggaatgggcaccactcctgaagtgcactcaatattcctcgaaggtcacacatttcttgtgaggaaccatcgccaggctagcttggaaatctcgccaataactttccttactgctcaaacactcttgatggaccttggacagtttctactgttttgtcatatctcttcccaccaacatgatggcatggaagcttatgtcaaagtagacagctgtccagaggaaccccaactacgaatgaaaaataatgaagaagcggaagactatgatgatgatcttactgattctgaaatggatgtggtcaggtttgatgatgacaactctccttcctttatccaaattcgctcagttgccaagaagcatcctaaaacttgggtacattacattgctgctgaagaggaggactgggactatgctcccttagtcctcgcccccgatgacagaagttataaaagtcaatatttgaacaatggccctcagcggattggtaggaagtacaaaaaagtccgatttatggcatacacagatgaaacctttaagactcgtgaagctattcagcatgaatcaggaatcttgggacctttactttatggggaagttggagacacactgttgattatatttaagaatcaagcaagcagaccatataacatctaccctcacggaatcactgatgtccgtcctttgtattcaaggagattaccaaaaggtgtaaaacatttgaaggattttccaattctgccaggagaaatattcaaatataaatggacagtgactgtagaagatgggccaactaaatcagatcctcggtgcctgacccgctattactctagtttcgttaatatggagagagatctagcttcaggactcattggccctctcctcatctgctacaaagaatctgtagatcaaagaggaaaccagataatgtcagacaagaggaatgtcatcctgttttctgtatttgatgagaaccgaagctggtacctcacagagaatatacaacgctttctccccaatccagctggagtgcagcttgaggatccagagttccaagcctccaacatcatgcacagcatcaatggctatgtttttgatagtttgcagttgtcagtttgtttgcatgaggtggcatactggtacattctaagcattggagcacagactgacttcctttctgtcttcttctctggatataccttcaaacacaaaatggtctatgaagacacactcaccctattcccattctcaggagaaactgtcttcatgtcgatggaaaacccaggtctatggattctggggtgccacaactcagactttcggaacagaggcatgaccgccttactgaaggtttctagttgtgacaagaacactggtgattattacgaggacagttatgaagatatttcagcatacttgctgagtaaaaacaatgccattgaaccaagaagcttctctcaaaacggcgcgccaggttctcctgctggctcccccacctcaacagaagaggggacaagcgaaagcgctacgcctgagagtggccctggctctgagccagccacctccggctctgaaacccctgcctcgagcccaccagtcttgaaacgccatcaagctgaaataactcgtactactcttcagtcagatcaagaggaaatcgattatgatgataccatatcagttgaaatgaagaaggaagattttgacatttatgatgaggatgaaaatcagagcccccgcagctttcaaaagaaaacacgacactattttattgctgcagtggagaggctctgggattatgggatgagtagctccccacatgttctaagaaacagggctcagagtggcagtgtccctcagttcaagaaagttgttttccaggaatttactgatggctcctttactcagcccttataccgtggagaactaaatgaacatttgggactcctggggccatatataagagcagaagttgaagataatatcatggtaactttcagaaatcaggcctctcgtccctattccttctattctagccttatttcttatgaggaagatcagaggcaaggagcagaacctagaaaaaactttgtcaagcctaatgaaaccaaaacttacttttggaaagtgcaacatcatatggcacccactaaagatgagtttgactgcaaagcctgggcttatttctctgatgttgacctggaaaaagatgtgcactcaggcctgattggaccccttctggtctgccacactaacacactgaaccctgctcatgggagacaagtgacagtacaggaatttgctctgtttttcaccatctttgatgagaccaaaagctggtacttcactgaaaatatggaaagaaactgcaggggcgcgccaggtacgcccgggtcgggaacagcgtcctcaagcccgggtagctcgacgccgtcaggagccacagggtcgccgggatcgtcgactccatcaggcgcaacgggatcgcctggatcaagcactccatccggagcgacgggaagcccagggagctccccgtccgcatcgactgggacgggacctggagcaagccccggtacgtcgtcaacaggttcgcctggtgcctcgcctggcacgtccagcacggggagccccggaacgccgggttccggaaccgcatcctcctcaccaggtgcctcaccgggcacctcatcaacgggatcaccaggggcttcaccgggaacgagctcgacgggttcaccgggagcgtccccggggacttcgtcgacaggtagcccaggggcaagccccggtacatcgtcaacgggttccccagggacaccggggagcggtactgcatcgtcctcacccggttcctcgacacccagcggagccacgggttcgcccggtactccggggtccggaacggccagcagctcacccggttcctcgacgccatcaggtgccacgggctcgcctggaacgccaggctcgggcactgcgagcagcagccctggatcatcaacgcctagcggagcgaccggctcccctggatcgtcaactccctcgggcgcgactgggagcccaggaagctcaccgtcggcctcgacgggaacagggcctggttcgagcccctcagcttcaacaggaacaggtccaggcgcgtcgccaggtacatcatcgacgggttcgcctgggacccctgggtccggtactgcctcatcatcgcccggatcgtccaccccctcgggagcgacaggttcgcctgcctcgagcgctccctgcaatatccagatggaagatcccacttttaaagagaattatcgcttccatgcaatcaatggctacataatggatacactacctggcttagtaatggctcaggatcaaaggattcgatggtatctgctcagcatgggcagcaatgaaaacatccattctattcatttcagtggacatgtgttcactgtacgaaaaaaagaggagtataaaatggcactgtacaatctctatccaggtgtttttgagacagtggaaatgttaccatccaaagctggaatttggcgggtggaatgccttattggcgagcatctacatgctgggatgagcacactttttctggtgtacagcaataagtgtcagactcccctgggaatggcttctggacacattagagattttcagattacagcttcaggacaatatggacagtgggccccaaagctggccagacttcattattccggatcaatcaatgcctggagcaccaaggagcccttttcttggatcaaggtggatctgttggcaccaatgattattcacggcatcaagacccagggtgcccgtcagaagttctccagcctctacatctctcagtttatcatcatgtatagtcttgatgggaagaagtggcagacttatcgaggaaattccactggaaccttaatggtcttctttggcaatgtggattcatctgggataaaacacaatatttttaaccctccaattattgctcgatacatccgtttgcacccaactcattatagcattcgcagcactcttcgcatggagttgatgggctgtgatttaaatagttgcagcatgccattgggaatggagagtaaagcaatatcagatgcacagattactgcttcatcctactttaccaatatgtttgccacctggtctccttcaaaagctcgacttcacctccaagggaggagtaatgcctggagacctcaggtgaataatccaaaagagtggctgcaagtggacttccagaagacaatgaaagtcacaggagtaactactcagggagtaaaatctctgcttaccagcatgtatgtgaaggagttcctcatctccagcagtcaagatggccatcagtggactctcttttttcagaatggcaaagtaaaggtttttcagggaaatcaagactccttcacacctgtggtgaactctctagacccaccgttactgactcgctaccttcgaattcacccccagagttgggtgcaccagattgccctgaggatggaggttctgggctgcgaggcacaggacctctacggcgccggatcacctggggccgaaacggccgaacaaaaactcatctcagaagaggatctgtcacctgcaaccggtcatcatcaccatcaccattga

SEQ ID NO: 1409 - protein, 1661 aa, synthetic construct
  REGION 1..1661: note = Description of Artificial Sequence: Synthetic polypeptide
ATRRYYLGAVELSWDYMQSDLGELPVDARFPPRVPKSFPFNTSVVYKKTLFVEFTDHLFNIAKPRPPWMGLLGPTIQAEVYDTVVITLKNMASHPVSLHAVGVSYWKASEGAEYDDQTSQREKEDDKVFPGGSHTYVWQVLKENGPMASDPLCLTYSYLSHVDLVKDLNSGLIGALLVCREGSLAKEKTQTLHKFILLFAVFDEGKSWHSETKNSLMQDRDAASARAWPKMHTVNGYVNRSLPGLIGCHRKSVYWHVIGMGTTPEVHSIFLEGHTFLVRNHRQASLEISPITFLTAQTLLMDLGQFLLFCHISSHQHDGMEAYVKVDSCPEEPQLRMKNNEEAEDYDDDLTDSEMDVVRFDDDNSPSFIQIRSVAKKHPKTWVHYIAAEEEDWDYAPLVLAPDDRSYKSQYLNNGPQRIGRKYKKVRFMAYTDETFKTREAIQHESGILGPLLYGEVGDTLLIIFKNQASRPYNIYPHGITDVRPLYSRRLPKGVKHLKDFPILPGEIFKYKWTVTVEDGPTKSDPRCLTRYYSSFVNMERDLASGLIGPLLICYKESVDQRGNQIMSDKRNVILFSVFDENRSWYLTENIQRFLPNPAGVQLEDPEFQASNIMHSINGYVFDSLQLSVCLHEVAYWYILSIGAQTDFLSVFFSGYTFKHKMVYEDTLTLFPFSGETVFMSMENPGLWILGCHNSDFRNRGMTALLKVSSCDKNTGDYYEDSYEDISAYLLSKNNAIEPRSFSQNGAPGTPGSGTASSSPGSSTPSGATGSPGASPGTSSTGSPGTPGSGTASSSPGSSTPSGATGSPGSSPSASTGTGPGSSPSASTGTGPGSSTPSGATGSPGSSTPSGATGSPGASPGTSSTGSPGASPGTSSTGSPGASPGTSSTGSPASSPPVLKRHQAEITRTTLQSDQEEIDYDDTISVEMKKEDFDIYDEDENQSPRSFQKKTRHYFIAAVERLWDYGMSSSPHVLRNRAQSGSVPQFKKVVFQEFTDGSFTQPLYRGELNEHLGLLGPYIRAEVEDNIMVTFRNQASRPYSFYSSLISYEEDQRQGAEPRKNFVKPNETKTYFWKVQHHMAPTKDEFDCKAWAYFSDVDLEKDVHSGLIGPLLVCHTNTLNPAHGRQVTVQEFALFFTIFDETKSWYFTENMERNCRGAPGSPAGSPTSTEEGTSESATPESGPGSEPATSGSETPASSAPCNIQMEDPTFKENYRFHAINGYIMDTLPGLVMAQDQRIRWYLLSMGSNENIHSIHFSGHVFTVRKKEEYKMALYNLYPGVFETVEMLPSKAGIWRVECLIGEHLHAGMSTLFLVYSNKCQTPLGMASGHIRDFQITASGQYGQWAPKLARLHYSGSINAWSTKEPFSWIKVDLLAPMIIHGIKTQGARQKFSSLYISQFIIMYSLDGKKWQTYRGNSTGTLMVFFGNVDSSGIKHNIFNPPIIARYIRLHPTHYSIRSTLRMELMGCDLNSCSMPLGMESKAISDAQITASSYFTNMFATWSPSKARLHLQGRSNAWRPQVNNPKEWLQVDFQKTMKVTGVTTQGVKSLLTSMYVKEFLISSSQDGHQWTLFFQNGKVKVFQGNQDSFTPVVNSLDPPLLTRYLRIHPQSWVHQIALRMEVLGCEAQDLYGAGSPGAETAEQKLISEEDLSPATGHHHHHH

SEQ ID NO: 1410 - DNA, 4986 bp, synthetic construct
  misc_feature 1..4986: note = Description of Artificial Sequence: Synthetic polynucleotide
  source 1..4986: mol_type = other DNA
gccaccagaagatactacctgggtgcagtggaactgtcatgggactatatgcaaagtgatctcggtgagctgcctgtggacgcaagatttcctcctagagtgccaaaatcttttccattcaacacctcagtcgtgtacaaaaagactctgtttgtagaattcacggatcaccttttcaacatcgctaagccaaggccaccctggatgggtctgctaggtcctaccatccaggctgaggtttatgatacagtggtcattacacttaagaacatggcttcccatcctgtcagtcttcatgctgttggtgtatcctactggaaagcttctgagggagctgaatatgatgatcagaccagtcaaagggagaaagaagatgataaagtcttccctggtggaagccatacatatgtctggcaggtcctgaaagagaatggtccaatggcctctgacccactgtgccttacctactcatatctttctcatgtggacctggtaaaagacttgaattcaggcctcattggagccctactagtatgtagagaagggagtctggccaaggaaaagacacagaccttgcacaaatttatactactttttgctgtatttgatgaagggaaaagttggcactcagaaacaaagaactccttgatgcaggatagggatgctgcatctgctcgggcctggcctaaaatgcacacagtcaatggttatgtaaacaggtctctgccaggtctgattggatgccacaggaaatcagtctattggcatgtgattggaatgggcaccactcctgaagtgcactcaatattcctcgaaggtcacacatttcttgtgaggaaccatcgccaggctagcttggaaatctcgccaataactttccttactgctcaaacactcttgatggaccttggacagtttctactgttttgtcatatctcttcccaccaacatgatggcatggaagcttatgtcaaagtagacagctgtccagaggaaccccaactacgaatgaaaaataatgaagaagcggaagactatgatgatgatcttactgattctgaaatggatgtggtcaggtttgatgatgacaactctccttcctttatccaaattcgctcagttgccaagaagcatcctaaaacttgggtacattacattgctgctgaagaggaggactgggactatgctcccttagtcctcgcccccgatgacagaagttataaaagtcaatatttgaacaatggccctcagcggattggtaggaagtacaaaaaagtccgatttatggcatacacagatgaaacctttaagactcgtgaagctattcagcatgaatcaggaatcttgggacctttactttatggggaagttggagacacactgttgattatatttaagaatcaagcaagcagaccatataacatctaccctcacggaatcactgatgtccgtcctttgtattcaaggagattaccaaaaggtgtaaaacatttgaaggattttccaattctgccaggagaaatattcaaatataaatggacagtgactgtagaagatgggccaactaaatcagatcctcggtgcctgacccgctattactctagtttcgttaatatggagagagatctagcttcaggactcattggccctctcctcatctgctacaaagaatctgtagatcaaagaggaaaccagataatgtcagacaagaggaatgtcatcctgttttctgtatttgatgagaaccgaagctggtacctcacagagaatatacaacgctttctccccaatccagctggagtgcagcttgaggatccagagttccaagcctccaacatcatgcacagcatcaatggctatgtttttgatagtttgcagttgtcagtttgtttgcatgaggtggcatactggtacattctaagcattggagcacagactgacttcctttctgtcttcttctctggatataccttcaaacacaaaatggtctatgaagacacactcaccctattcccattctcaggagaaactgtcttcatgtcgatggaaaacccaggtctatggattctggggtgccacaactcagactttcggaacagaggcatgaccgccttactgaaggtttctagttgtgacaagaacactggtgattattacgaggacagttatgaagatatttcagcatacttgctgagtaaaaacaatgccattgaaccaagaagcttctctcaaaacggcgcgccaggtacaccgggcagcggcacggcttcgtcgtcacccggctcgtccacaccgtcgggagctacgggaagcccaggagcgtcaccgggaacgtcgtcaacggggtcaccgggtacgccaggtagcggcacggccagcagctcgccaggttcatcgaccccgtcgggagcgactgggtcgcccggatcaagcccgtcagcttccactggaacaggacccgggtcgtcgccgtcagcctcaacggggacaggacctggttcatcgacgccgtcaggggcgacaggctcgcccggatcgtcaacaccctcgggggcaacggggagccctggtgcgtcgcctggaacctcatccaccggaagcccgggggcctcgccgggtacgagctccacgggatcgcccggagcgtcccccggaacttcaagcacagggagccctgcctcgagcccaccagtcttgaaacgccatcaagctgaaataactcgtactactcttcagtcagatcaagaggaaatcgattatgatgataccatatcagttgaaatgaagaaggaagattttgacatttatgatgaggatgaaaatcagagcccccgcagctttcaaaagaaaacacgacactattttattgctgcagtggagaggctctgggattatgggatgagtagctccccacatgttctaagaaacagggctcagagtggcagtgtccctcagttcaagaaagttgttttccaggaatttactgatggctcctttactcagcccttataccgtggagaactaaatgaacatttgggactcctggggccatatataagagcagaagttgaagataatatcatggtaactttcagaaatcaggcctctcgtccctattccttctattctagccttatttcttatgaggaagatcagaggcaaggagcagaacctagaaaaaactttgtcaagcctaatgaaaccaaaacttacttttggaaagtgcaacatcatatggcacccactaaagatgagtttgactgcaaagcctgggcttatttctctgatgttgacctggaaaaagatgtgcactcaggcctgattggaccccttctggtctgccacactaacacactgaaccctgctcatgggagacaagtgacagtacaggaatttgctctgtttttcaccatctttgatgagaccaaaagctggtacttcactgaaaatatggaaagaaactgcaggggcgcgccaggttctcctgctggctcccccacctcaacagaagaggggacaagcgaaagcgctacgcctgagagtggccctggctctgagccagccacctccggctctgaaacccctgcctcgagcgctccctgcaatatccagatggaagatcccacttttaaagagaattatcgcttccatgcaatcaatggctacataatggatacactacctggcttagtaatggctcaggatcaaaggattcgatggtatctgctcagcatgggcagcaatgaaaacatccattctattcatttcagtggacatgtgttcactgtacgaaaaaaagaggagtataaaatggcactgtacaatctctatccaggtgtttttgagacagtggaaatgttaccatccaaagctggaatttggcgggtggaatgccttattggcgagcatctacatgctgggatgagcacactttttctggtgtacagcaataagtgtcagactcccctgggaatggcttctggacacattagagattttcagattacagcttcaggacaatatggacagtgggccccaaagctggccagacttcattattccggatcaatcaatgcctggagcaccaaggagcccttttcttggatcaaggtggatctgttggcaccaatgattattcacggcatcaagacccagggtgcccgtcagaagttctccagcctctacatctctcagtttatcatcatgtatagtcttgatgggaagaagtggcagacttatcgaggaaattccactggaaccttaatggtcttctttggcaatgtggattcatctgggataaaacacaatatttttaaccctccaattattgctcgatacatccgtttgcacccaactcattatagcattcgcagcactcttcgcatggagttgatgggctgtgatttaaatagttgcagcatgccattgggaatggagagtaaagcaatatcagatgcacagattactgcttcatcctactttaccaatatgtttgccacctggtctccttcaaaagctcgacttcacctccaagggaggagtaatgcctggagacctcaggtgaataatccaaaagagtggctgcaagtggacttccagaagacaatgaaagtcacaggagtaactactcagggagtaaaatctctgcttaccagcatgtatgtgaaggagttcctcatctccagcagtcaagatggccatcagtggactctcttttttcagaatggcaaagtaaaggtttttcagggaaatcaagactccttcacacctgtggtgaactctctagacccaccgttactgactcgctaccttcgaattcacccccagagttgggtgcaccagattgccctgaggatggaggttctgggctgcgaggcacaggacctctacggcgccggatcacctggggccgaaacggccgaacaaaaactcatctcagaagaggatctgtcacctgcaaccggtcatcatcaccatcaccattga

SEQ ID NO: 1411 - protein, 1769 aa, synthetic construct
  REGION 1..1769: note = Description of Artificial Sequence: Synthetic polypeptide
ATRRYYLGAVELSWDYMQSDLGELPVDARFPPRVPKSFPFNTSVVYKKTLFVEFTDHLFNIAKPRPPWMGLLGPTIQAEVYDTVVITLKNMASHPVSLHAVGVSYWKASEGAEYDDQTSQREKEDDKVFPGGSHTYVWQVLKENGPMASDPLCLTYSYLSHVDLVKDLNSGLIGALLVCREGSLAKEKTQTLHKFILLFAVFDEGKSWHSETKNSLMQDRDAASARAWPKMHTVNGYVNRSLPGLIGCHRKSVYWHVIGMGTTPEVHSIFLEGHTFLVRNHRQASLEISPITFLTAQTLLMDLGQFLLFCHISSHQHDGMEAYVKVDSCPEEPQLRMKNNEEAEDYDDDLTDSEMDVVRFDDDNSPSFIQIRSVAKKHPKTWVHYIAAEEEDWDYAPLVLAPDDRSYKSQYLNNGPQRIGRKYKKVRFMAYTDETFKTREAIQHESGILGPLLYGEVGDTLLIIFKNQASRPYNIYPHGITDVRPLYSRRLPKGVKHLKDFPILPGEIFKYKWTVTVEDGPTKSDPRCLTRYYSSFVNMERDLASGLIGPLLICYKESVDQRGNQIMSDKRNVILFSVFDENRSWYLTENIQRFLPNPAGVQLEDPEFQASNIMHSINGYVFDSLQLSVCLHEVAYWYILSIGAQTDFLSVFFSGYTFKHKMVYEDTLTLFPFSGETVFMSMENPGLWILGCHNSDFRNRGMTALLKVSSCDKNTGDYYEDSYEDISAYLLSKNNAIEPRSFSQNGAPGTPGSGTASSSPGSSTPSGATGSPGASPGTSSTGSPGTPGSGTASSSPGSSTPSGATGSPGSSPSASTGTGPGSSPSASTGTGPGSSTPSGATGSPGSSTPSGATGSPGASPGTSSTGSPGASPGTSSTGSPGASPGTSSTGSPASSPPVLKRHQAEITRTTLQSDQEEIDYDDTISVEMKKEDFDIYDEDENQSPRSFQKKTRHYFIAAVERLWDYGMSSSPHVLRNRAQSGSVPQFKKVVFQEFTDGSFTQPLYRGELNEHLGLLGPYIRAEVEDNIMVTFRNQASRPYSFYSSLISYEEDQRQGAEPRKNFVKPNETKTYFWKVQHHMAPTKDEFDCKAWAYFSDVDLEKDVHSGLIGPLLVCHTNTLNPAHGRQVTVQEFALFFTIFDETKSWYFTENMERNCRGAPGTPGSGTASSSPGASPGTSSTGSPGASPGTSSTGSPGASPGTSSTGSPGSSPSASTGTGPGTPGSGTASSSPGASPGTSSTGSPGASPGTSSTGSPGASPGTSSTGSPGSSTPSGATGSPGSSTPSGATGSPGASPGTSSTGSPASSAPCNIQMEDPTFKENYRFHAINGYIMDTLPGLVMAQDQRIRWYLLSMGSNENIHSIHFSGHVFTVRKKEEYKMALYNLYPGVFETVEMLPSKAGIWRVECLIGEHLHAGMSTLFLVYSNKCQTPLGMASGHIRDFQITASGQYGQWAPKLARLHYSGSINAWSTKEPFSWIKVDLLAPMIIHGIKTQGARQKFSSLYISQFIIMYSLDGKKWQTYRGNSTGTLMVFFGNVDSSGIKHNIFNPPIIARYIRLHPTHYSIRSTLRMELMGCDLNSCSMPLGMESKAISDAQITASSYFTNMFATWSPSKARLHLQGRSNAWRPQVNNPKEWLQVDFQKTMKVTGVTTQGVKSLLTSMYVKEFLISSSQDGHQWTLFFQNGKVKVFQGNQDSFTPVVNSLDPPLLTRYLRIHPQSWVHQIALRMEVLGCEAQDLYGAGSPGAETAEQKLISEEDLSPATGHHHHHH

SEQ ID NO: 1412 - DNA, 5310 bp, synthetic construct
  misc_feature 1..5310: note = Description of Artificial Sequence: Synthetic polynucleotide
  source 1..5310: mol_type = other DNA
gccaccagaagatactacctgggtgcagtggaactgtcatgggactatatgcaaagtgatctcggtgagctgcctgtggacgcaagatttcctcctagagtgccaaaatcttttccattcaacacctcagtcgtgtacaaaaagactctgtttgtagaattcacggatcaccttttcaacatcgctaagccaaggccaccctggatgggtctgctaggtcctaccatccaggctgaggtttatgatacagtggtcattacacttaagaacatggcttcccatcctgtcagtcttcatgctgttggtgtatcctactggaaagcttctgagggagctgaatatgatgatcagaccagtcaaagggagaaagaagatgataaagtcttccctggtggaagccatacatatgtctggcaggtcctgaaagagaatggtccaatggcctctgacccactgtgccttacctactcatatctttctcatgtggacctggtaaaagacttgaattcaggcctcattggagccctactagtatgtagagaagggagtctggccaaggaaaagacacagaccttgcacaaatttatactactttttgctgtatttgatgaagggaaaagttggcactcagaaacaaagaactccttgatgcaggatagggatgctgcatctgctcgggcctggcctaaaatgcacacagtcaatggttatgtaaacaggtctctgccaggtctgattggatgccacaggaaatcagtctattggcatgtgattggaatgggcaccactcctgaagtgcactcaatattcctcgaaggtcacacatttcttgtgaggaaccatcgccaggctagcttggaaatctcgccaataactttccttactgctcaaacactcttgatggaccttggacagtttctactgttttgtcatatctcttcccaccaacatgatggcatggaagcttatgtcaaagtagacagctgtccagaggaaccccaactacgaatgaaaaataatgaagaagcggaagactatgatgatgatcttactgattctgaaatggatgtggtcaggtttgatgatgacaactctccttcctttatccaaattcgctcagttgccaagaagcatcctaaaacttgggtacattacattgctgctgaagaggaggactgggactatgctcccttagtcctcgcccccgatgacagaagttataaaagtcaatatttgaacaatggccctcagcggattggtaggaagtacaaaaaagtccgatttatggcatacacagatgaaacctttaagactcgtgaagctattcagcatgaatcaggaatcttgggacctttactttatggggaagttggagacacactgttgattatatttaagaatcaagcaagcagaccatataacatctaccctcacggaatcactgatgtccgtcctttgtattcaaggagattaccaaaaggtgtaaaacatttgaaggattttccaattctgccaggagaaatattcaaatataaatggacagtgactgtagaagatgggccaactaaatcagatcctcggtgcctgacccgctattactctagtttcgttaatatggagagagatctagcttcaggactcattggccctctcctcatctgctacaaagaatctgtagatcaaagaggaaaccagataatgtcagacaagaggaatgtcatcctgttttctgtatttgatgagaaccgaagctggtacctcacagagaatatacaacgctttctccccaatccagctggagtgcagcttgaggatccagagttccaagcctccaacatcatgcacagcatcaatggctatgtttttgatagtttgcagttgtcagtttgtttgcatgaggtggcatactggtacattctaagcattggagcacagactgacttcctttctgtcttcttctctggatataccttcaaacacaaaatggtctatgaagacacactcaccctattcccattctcaggagaaactgtcttcatgtcgatggaaaacccaggtctatggattctggggtgccacaactcagactttcggaacagaggcatgaccgccttactgaaggtttctagttgtgacaagaacactggtgattattacgaggacagttatgaagatatttcagcatacttgctgagtaaaaacaatgccattgaaccaagaagcttctctcaaaacggcgcgccaggtacaccgggcagcggcacggcttcgtcgtcacccggctcgtccacaccgtcgggagctacgggaagcccaggagcgtcaccgggaacgtcgtcaacggggtcaccgggtacgccaggtagcggcacggccagcagctcgccaggttcatcgaccccgtcgggagcgactgggtcgcccggatcaagcccgtcagcttccactggaacaggacccgggtcgtcgccgtcagcctcaacggggacaggacctggttcatcgacgccgtcaggggcgacaggctcgcccggatcgtcaacaccctcgggggcaacggggagccctggtgcgtcgcctggaacctcatccaccggaagcccgggggcctcgccgggtacgagctccacgggatcgcccggagcgtcccccggaacttcaagcacagggagccctgcctcgagcccaccagtcttgaaacgccatcaagctgaaataactcgtactactcttcagtcagatcaagaggaaatcgattatgatgataccatatcagttgaaatgaagaaggaagattttgacatttatgatgaggatgaaaatcagagcccccgcagctttcaaaagaaaacacgacactattttattgctgcagtggagaggctctgggattatgggatgagtagctccccacatgttctaagaaacagggctcagagtggcagtgtccctcagttcaagaaagttgttttccaggaatttactgatggctcctttactcagcccttataccgtggagaactaaatgaacatttgggactcctggggccatatataagagcagaagttgaagataatatcatggtaactttcagaaatcaggcctctcgtccctattccttctattctagccttatttcttatgaggaagatcagaggcaaggagcagaacctagaaaaaactttgtcaagcctaatgaaaccaaaacttacttttggaaagtgcaacatcatatggcacccactaaagatgagtttgactgcaaagcctgggcttatttctctgatgttgacctggaaaaagatgtgcactcaggcctgattggaccccttctggtctgccacactaacacactgaaccctgctcatgggagacaagtgacagtacaggaatttgctctgtttttcaccatctttgatgagaccaaaagctggtacttcactgaaaatatggaaagaaactgcaggggcgcgccaggtacacccggatcgggtacagcgtcatcgagccccggtgcgtcacctggtacgtcgagcacggggtcgccaggggcgtcccctgggacgtcctcaacaggctcgcccggtgcgtcacccggcacgtcgtccacgggttcacctggtagctccccttccgcgtccactggcaccgggcctggaactccggggagcggcacagcgagctcgtcgccgggagcatcgcctgggacatcgagcaccgggtcgccaggagcatcgcccggaacatccagcacaggaagccccggcgcgtcgcccgggacatcaagcacaggttccccgggatcgagcacgccgtccggagccactggatcaccagggagctcgacaccttccggcgcaacgggatcgcccggagccagcccgggtacgtcaagcactggctcccctgcctcgagcgctccctgcaatatccagatggaagatcccacttttaaagagaattatcgcttccatgcaatcaatggctacataatggatacactacctggcttagtaatggctcaggatcaaaggattcgatggtatctgctcagcatgggcagcaatgaaaacatccattctattcatttcagtggacatgtgttcactgtacgaaaaaaagaggagtataaaatggcactgtacaatctctatccaggtgtttttgagacagtggaaatgttaccatccaaagctggaatttggcgggtggaatgccttattggcgagcatctacatgctgggatgagcacactttttctggtgtacagcaataagtgtcagactcccctgggaatggcttctggacacattagagattttcagattacagcttcaggacaatatggacagtgggccccaaagctggccagacttcattattccggatcaatcaatgcctggagcaccaaggagcccttttcttggatcaaggtggatctgttggcaccaatgattattcacggcatcaagacccagggtgcccgtcagaagttctccagcctctacatctctcagtttatcatcatgtatagtcttgatgggaagaagtggcagacttatcgaggaaattccactggaaccttaatggtcttctttggcaatgtggattcatctgggataaaacacaatatttttaaccctccaattattgctcgatacatccgtttgcacccaactcattatagcattcgcagcactcttcgcatggagttgatgggctgtgatttaaatagttgcagcatgccattgggaatggagagtaaagcaatatcagatgcacagattactgcttcatcctactttaccaatatgtttgccacctggtctccttcaaaagctcgacttcacctccaagggaggagtaatgcctggagacctcaggtgaataatccaaaagagtggctgcaagtggacttccagaagacaatgaaagtcacaggagtaactactcagggagtaaaatctctgcttaccagcatgtatgtgaaggagttcctcatctccagcagtcaagatggccatcagtggactctcttttttcagaatggcaaagtaaaggtttttcagggaaatcaagactccttcacacctgtggtgaactctctagacccaccgttactgactcgctaccttcgaattcacccccagagttgggtgcaccagattgccctgaggatggaggttctgggctgcgaggcacaggacctctacggcgccggatcacctggggccgaaacggccgaacaaaaactcatctcagaagaggatctgtcacctgcaaccggtcatcatcaccatcaccattga

SEQ ID NO: 1413 - protein, 1913 aa, synthetic construct
  REGION 1..1913: note = Description of Artificial Sequence: Synthetic polypeptide
ATRRYYLGAVELSWDYMQSDLGELPVDARFPPRVPKSFPFNTSVVYKKTLFVEFTDHLFNIAKPRPPWMGLLGPTIQAEVYDTVVITLKNMASHPVSLHAVGVSYWKASEGAEYDDQTSQREKEDDKVFPGGSHTYVWQVLKENGPMASDPLCLTYSYLSHVDLVKDLNSGLIGALLVCREGSLAKEKTQTLHKFILLFAVFDEGKSWHSETKNSLMQDRDAASARAWPKMHTVNGYVNRSLPGLIGCHRKSVYWHVIGMGTTPEVHSIFLEGHTFLVRNHRQASLEISPITFLTAQTLLMDLGQFLLFCHISSHQHDGMEAYVKVDSCPEEPQLRMKNNEEAEDYDDDLTDSEMDVVRFDDDNSPSFIQIRSVAKKHPKTWVHYIAAEEEDWDYAPLVLAPDDRSYKSQYLNNGPQRIGRKYKKVRFMAYTDETFKTREAIQHESGILGPLLYGEVGDTLLIIFKNQASRPYNIYPHGITDVRPLYSRRLPKGVKHLKDFPILPGEIFKYKWTVTVEDGPTKSDPRCLTRYYSSFVNMERDLASGLIGPLLICYKESVDQRGNQIMSDKRNVILFSVFDENRSWYLTENIQRFLPNPAGVQLEDPEFQASNIMHSINGYVFDSLQLSVCLHEVAYWYILSIGAQTDFLSVFFSGYTFKHKMVYEDTLTLFPFSGETVFMSMENPGLWILGCHNSDFRNRGMTALLKVSSCDKNTGDYYEDSYEDISAYLLSKNNAIEPRSFSQNGAPGTPGSGTASSSPGSSTPSGATGSPGASPGTSSTGSPGTPGSGTASSSPGSSTPSGATGSPGSSPSASTGTGPGSSPSASTGTGPGSSTPSGATGSPGSSTPSGATGSPGASPGTSSTGSPGASPGTSSTGSPGASPGTSSTGSPASSPPVLKRHQAEITRTTLQSDQEEIDYDDTISVEMKKEDFDIYDEDENQSPRSFQKKTRHYFIAAVERLWDYGMSSSPHVLRNRAQSGSVPQFKKVVFQEFTDGSFTQPLYRGELNEHLGLLGPYIRAEVEDNIMVTFRNQASRPYSFYSSLISYEEDQRQGAEPRKNFVKPNETKTYFWKVQHHMAPTKDEFDCKAWAYFSDVDLEKDVHSGLIGPLLVCHTNTLNPAHGRQVTVQEFALFFTIFDETKSWYFTENMERNCRGAPGTPGSGTASSSPGSSTPSGATGSPGSSTPSGATGSPGSSTPSGATGSPGSSPSASTGTGPGASPGTSSTGSPGASPGTSSTGSPGTPGSGTASSSPGASPGTSSTGSPGASPGTSSTGSPGASPGTSSTGSPGASPGTSSTGSPGTPGSGTASSSPGSSTPSGATGSPGTPGSGTASSSPGSSTPSGATGSPGTPGSGTASSSPGSSTPSGATGSPGSSTPSGATGSPGSSPSASTGTGPGSSPSASTGTGPGASPGTSSTGSPGTPGSGTASSSPGSSTPSGATGSPASSAPCNIQMEDPTFKENYRFHAINGYIMDTLPGLVMAQDQRIRWYLLSMGSNENIHSIHFSGHVFTVRKKEEYKMALYNLYPGVFETVEMLPSKAGIWRVECLIGEHLHAGMSTLFLVYSNKCQTPLGMASGHIRDFQITASGQYGQWAPKLARLHYSGSINAWSTKEPFSWIKVDLLAPMIIHGIKTQGARQKFSSLYISQFIIMYSLDGKKWQTYRGNSTGTLMVFFGNVDSSGIKHNIFNPPIIARYIRLHPTHYSIRSTLRMELMGCDLNSCSMPLGMESKAISDAQITASSYFTNMFATWSPSKARLHLQGRSNAWRPQVNNPKEWLQVDFQKTMKVTGVTTQGVKSLLTSMYVKEFLISSSQDGHQWTLFFQNGKVKVFQGNQDSFTPVVNSLDPPLLTRYLRIHPQSWVHQIALRMEVLGCEAQDLYGAGSPGAETAEQKLISEEDLSPATGHHHHHH

SEQ ID NO: 1414 - DNA, 5742 bp, synthetic construct
  misc_feature 1..5742: note = Description of Artificial Sequence: Synthetic polynucleotide
  source 1..5742: mol_type = other DNA
gccaccagaagatactacctgggtgcagtggaactgtcatgggactatatgcaaagtgatctcggtgagctgcctgtggacgcaagatttcctcctagagtgccaaaatcttttccattcaacacctcagtcgtgtacaaaaagactctgtttgtagaattcacggatcaccttttcaacatcgctaagccaaggccaccctggatgggtctgctaggtcctaccatccaggctgaggtttatgatacagtggtcattacacttaagaacatggcttcccatcctgtcagtcttcatgctgttggtgtatcctactggaaagcttctgagggagctgaatatgatgatcagaccagtcaaagggagaaagaagatgataaagtcttccctggtggaagccatacatatgtctggcaggtcctgaaagagaatggtccaatggcctctgacccactgtgccttacctactcatatctttctcatgtggacctggtaaaagacttgaattcaggcctcattggagccctactagtatgtagagaagggagtctggccaaggaaaagacacagaccttgcacaaatttatactactttttgctgtatttgatgaagggaaaagttggcactcagaaacaaagaactccttgatgcaggatagggatgctgcatctgctcgggcctggcctaaaatgcacacagtcaatggttatgtaaacaggtctctgccaggtctgattggatgccacaggaaatcagtctattggcatgtgattggaatgggcaccactcctgaagtgcactcaatattcctcgaaggtcacacatttcttgtgaggaaccatcgccaggctagcttggaaatctcgccaataactttccttactgctcaaacactcttgatggaccttggacagtttctactgttttgtcatatctcttcccaccaacatgatggcatggaagcttatgtcaaagtagacagctgtccagaggaaccccaactacgaatgaaaaataatgaagaagcggaagactatgatgatgatcttactgattctgaaatggatgtggtcaggtttgatgatgacaactctccttcctttatccaaattcgctcagttgccaagaagcatcctaaaacttgggtacattacattgctgctgaagaggaggactgggactatgctcccttagtcctcgcccccgatgacagaagttataaaagtcaatatttgaacaatggccctcagcggattggtaggaagtacaaaaaagtccgatttatggcatacacagatgaaacctttaagactcgtgaagctattcagcatgaatcaggaatcttgggacctttactttatggggaagttggagacacactgttgattatatttaagaatcaagcaagcagaccatataacatctaccctcacggaatcactgatgtccgtcctttgtattcaaggagattaccaaaaggtgtaaaacatttgaaggattttccaattctgccaggagaaatattcaaatataaatggacagtgactgtagaagatgggccaactaaatcagatcctcggtgcctgacccgctattactctagtttcgttaatatggagagagatctagcttcaggactcattggccctctcctcatctgctacaaagaatctgtagatcaaagaggaaaccagataatgtcagacaagaggaatgtcatcctgttttctgtatttgatgagaaccgaagctggtacctcacagagaatatacaacgctttctccccaatccagctggagtgcagcttgaggatccagagttccaagcctccaacatcatgcacagcatcaatggctatgtttttgatagtttgcagttgtcagtttgtttgcatgaggtggcatactggtacattctaagcattggagcacagactgacttcctttctgtcttcttctctggatataccttcaaacacaaaatggtctatgaagacacactcaccctattcccattctcaggagaaactgtcttcatgtcgatggaaaacccaggtctatggattctggggtgccacaactcagactttcggaacagaggcatgaccgccttactgaaggtttctagttgtgacaagaacactggtgattattacgaggacagttatgaagatatttcagcatacttgctgagtaaaaacaatgccattgaaccaagaagcttctctcaaaacggcgcgccaggtacaccgggcagcggcacggcttcgtcgtcacccggctcgtccacaccgtcgggagctacgggaagcccaggagcgtcaccgggaacgtcgtcaacggggtcaccgggtacgccaggtagcggcacggccagcagctcgccaggttcatcgaccccgtcgggagcgactgggtcgcccggatcaagcccgtcagcttccactggaacaggacccgggtcgtcgccgtcagcctcaacggggacaggacctggttcatcgacgccgtcaggggcgacaggctcgcccggatcgtcaacaccctcgggggcaacggggagccctggtgcgtcgcctggaacctcatccaccggaagcccgggggcctcgccgggtacgagctccacgggatcgcccggagcgtcccccggaacttcaagcacagggagccctgcctcgagcccaccagtcttgaaacgccatcaagctgaaataactcgtactactcttcagtcagatcaagaggaaatcgattatgatgataccatatcagttgaaatgaagaaggaagattttgacatttatgatgaggatgaaaatcagagcccccgcagctttcaaaagaaaacacgacactattttattgctgcagtggagaggctctgggattatgggatgagtagctccccacatgttctaagaaacagggctcagagtggcagtgtccctcagttcaagaaagttgttttccaggaatttactgatggctcctttactcagcccttataccgtggagaactaaatgaacatttgggactcctggggccatatataagagcagaagttgaagataatatcatggtaactttcagaaatcaggcctctcgtccctattccttctattctagccttatttcttatgaggaagatcagaggcaaggagcagaacctagaaaaaactttgtcaagcctaatgaaaccaaaacttacttttggaaagtgcaacatcatatggcacccactaaagatgagtttgactgcaaagcctgggcttatttctctgatgttgacctggaaaaagatgtgcactcaggcctgattggaccccttctggtctgccacactaacacactgaaccctgctcatgggagacaagtgacagtacaggaatttgctctgtttttcaccatctttgatgagaccaaaagctggtacttcactgaaaatatggaaagaaactgcaggggcgcgccaggtacgcccgggtcgggaacagcgtcctcaagcccgggtagctcgacgccgtcaggagccacagggtcgccgggatcgtcgactccatcaggcgcaacgggatcgcctggatcaagcactccatccggagcgacgggaagcccagggagctccccgtccgcatcgactgggacgggacctggagcaagccccggtacgtcgtcaacaggttcgcctggtgcctcgcctggcacgtccagcacggggagccccggaacgccgggttccggaaccgcatcctcctcaccaggtgcctcaccgggcacctcatcaacgggatcaccaggggcttcaccgggaacgagctcgacgggttcaccgggagcgtccccggggacttcgtcgacaggtagcccaggggcaagccccggtacatcgtcaacgggttccccagggacaccggggagcggtactgcatcgtcctcacccggttcctcgacacccagcggagccacgggttcgcccggtactccggggtccggaacggccagcagctcacccggttcctcgacgccatcaggtgccacgggctcgcctggaacgccaggctcgggcactgcgagcagcagccctggatcatcaacgcctagcggagcgaccggctcccctggatcgtcaactccctcgggcgcgactgggagcccaggaagctcaccgtcggcctcgacgggaacagggcctggttcgagcccctcagcttcaacaggaacaggtccaggcgcgtcgccaggtacatcatcgacgggttcgcctgggacccctgggtccggtactgcctcatcatcgcccggatcgtccaccccctcgggagcgacaggttcgcctgcctcgagcgctccctgcaatatccagatggaagatcccacttttaaagagaattatcgcttccatgcaatcaatggctacataatggatacactacctggcttagtaatggctcaggatcaaaggattcgatggtatctgctcagcatgggcagcaatgaaaacatccattctattcatttcagtggacatgtgttcactgtacgaaaaaaagaggagtataaaatggcactgtacaatctctatccaggtgtttttgagacagtggaaatgttaccatccaaagctggaatttggcgggtggaatgccttattggcgagcatctacatgctgggatgagcacactttttctggtgtacagcaataagtgtcagactcccctgggaatggcttctggacacattagagattttcagattacagcttcaggacaatatggacagtgggccccaaagctggccagacttcattattccggatcaatcaatgcctggagcaccaaggagcccttttcttggatcaaggtggatctgttggcaccaatgattattcacggcatcaagacccagggtgcccgtcagaagttctccagcctctacatctctcagtttatcatcatgtatagtcttgatgggaagaagtggcagacttatcgaggaaattccactggaaccttaatggtcttctttggcaatgtggattcatctgggataaaacacaatatttttaaccctccaattattgctcgatacatccgtttgcacccaactcattatagcattcgcagcactcttcgcatggagttgatgggctgtgatttaaatagttgcagcatgccattgggaatggagagtaaagcaatatcagatgcacagattactgcttcatcctactttaccaatatgtttgccacctggtctccttcaaaagctcgacttcacctccaagggaggagtaatgcctggagacctcaggtgaataatccaaaagagtggctgcaagtggacttccagaagacaatgaaagtcacaggagtaactactcagggagtaaaatctctgcttaccagcatgtatgtgaaggagttcctcatctccagcagtcaagatggccatcagtggactctcttttttcagaatggcaaagtaaaggtttttcagggaaatcaagactccttcacacctgtggtgaactctctagacccaccgttactgactcgctaccttcgaattcacccccagagttgggtgcaccagattgccctgaggatggaggttctgggctgcgaggcacaggacctctacggcgccggatcacctggggccgaaacggccgaacaaaaactcatctcagaagaggatctgtcacctgcaaccggtcatcatcaccatcaccattga

SEQ ID NO: 1415 - protein, 1805 aa, synthetic construct
  REGION 1..1805: note = Description of Artificial Sequence: Synthetic polypeptide
ATRRYYLGAVELSWDYMQSDLGELPVDARFPPRVPKSFPFNTSVVYKKTLFVEFTDHLFNIAKPRPPWMGLLGPTIQAEVYDTVVITLKNMASHPVSLHAVGVSYWKASEGAEYDDQTSQREKEDDKVFPGGSHTYVWQVLKENGPMASDPLCLTYSYLSHVDLVKDLNSGLIGALLVCREGSLAKEKTQTLHKFILLFAVFDEGKSWHSETKNSLMQDRDAASARAWPKMHTVNGYVNRSLPGLIGCHRKSVYWHVIGMGTTPEVHSIFLEGHTFLVRNHRQASLEISPITFLTAQTLLMDLGQFLLFCHISSHQHDGMEAYVKVDSCPEEPQLRMKNNEEAEDYDDDLTDSEMDVVRFDDDNSPSFIQIRSVAKKHPKTWVHYIAAEEEDWDYAPLVLAPDDRSYKSQYLNNGPQRIGRKYKKVRFMAYTDETFKTREAIQHESGILGPLLYGEVGDTLLIIFKNQASRPYNIYPHGITDVRPLYSRRLPKGVKHLKDFPILPGEIFKYKWTVTVEDGPTKSDPRCLTRYYSSFVNMERDLASGLIGPLLICYKESVDQRGNQIMSDKRNVILFSVFDENRSWYLTENIQRFLPNPAGVQLEDPEFQASNIMHSINGYVFDSLQLSVCLHEVAYWYILSIGAQTDFLSVFFSGYTFKHKMVYEDTLTLFPFSGETVFMSMENPGLWILGCHNSDFRNRGMTALLKVSSCDKNTGDYYEDSYEDISAYLLSKNNAIEPRSFSQNGAPPGASPGTSSTGSPGASPGTSSTGSPGTPGSGTASSSPGSSTPSGATGSPGTPGSGTASSSPGSSTPSGATGSPGTPGSGTASSSPGSSTPSGATGSPGSSTPSGATGSPGSSPSASTGTGPGSSPSASTGTGPGASPGTSSTGSPGTPGSGTASSSPGSSTPSGATGSPGSSPSASTGTGPGSSPSASTGTGPGASPGTSSTGSPGASPGTSSTGSPGSSTPSGATGSPGSSPSASTGTGPGASPGTSSTGSPGSSPSASTGTGPGTPGSGTASSSPGSSTPSGATGSASSPPVLKRHQAEITRTTLQSDQEEIDYDDTISVEMKKEDFDIYDEDENQSPRSFQKKTRHYFIAAVERLWDYGMSSSPHVLRNRAQSGSVPQFKKVVFQEFTDGSFTQPLYRGELNEHLGLLGPYIRAEVEDNIMVTFRNQASRPYSFYSSLISYEEDQRQGAEPRKNFVKPNETKTYFWKVQHHMAPTKDEFDCKAWAYFSDVDLEKDVHSGLIGPLLVCHTNTLNPAHGRQVTVQEFALFFTIFDETKSWYFTENMERNCRGAPGSPAGSPTSTEEGTSESATPESGPGSEPATSGSETPASSAPCNIQMEDPTFKENYRFHAINGYIMDTLPGLVMAQDQRIRWYLLSMGSNENIHSIHFSGHVFTVRKKEEYKMALYNLYPGVFETVEMLPSKAGIWRVECLIGEHLHAGMSTLFLVYSNKCQTPLGMASGHIRDFQITASGQYGQWAPKLARLHYSGSINAWSTKEPFSWIKVDLLAPMIIHGIKTQGARQKFSSLYISQFIIMYSLDGKKWQTYRGNSTGTLMVFFGNVDSSGIKHNIFNPPIIARYIRLHPTHYSIRSTLRMELMGCDLNSCSMPLGMESKAISDAQITASSYFTNMFATWSPSKARLHLQGRSNAWRPQVNNPKEWLQVDFQKTMKVTGVTTQGVKSLLTSMYVKEFLISSSQDGHQWTLFFQNGKVKVFQGNQDSFTPVVNSLDPPLLTRYLRIHPQSWVHQIALRMEVLGCEAQDLYGAGSPGAETAEQKLISEEDLSPATGHHHHHH

SEQ ID NO: 1416 - DNA, 5418 bp, synthetic construct
  misc_feature 1..5418: note = Description of Artificial Sequence: Synthetic polynucleotide
  source 1..5418: mol_type = other DNA
gccaccagaagatactacctgggtgcagtggaactgtcatgggactatatgcaaagtgatctcggtgagctgcctgtggacgcaagatttcctcctagagtgccaaaatcttttccattcaacacctcagtcgtgtacaaaaagactctgtttgtagaattcacggatcaccttttcaacatcgctaagccaaggccaccctggatgggtctgctaggtcctaccatccaggctgaggtttatgatacagtggtcattacacttaagaacatggcttcccatcctgtcagtcttcatgctgttggtgtatcctactggaaagcttctgagggagctgaatatgatgatcagaccagtcaaagggagaaagaagatgataaagtcttccctggtggaagccatacatatgtctggcaggtcctgaaagagaatggtccaatggcctctgacccactgtgccttacctactcatatctttctcatgtggacctggtaaaagacttgaattcaggcctcattggagccctactagtatgtagagaagggagtctggccaaggaaaagacacagaccttgcacaaatttatactactttttgctgtatttgatgaagggaaaagttggcactcagaaacaaagaactccttgatgcaggatagggatgctgcatctgctcgggcctggcctaaaatgcacacagtcaatggttatgtaaacaggtctctgccaggtctgattggatgccacaggaaatcagtctattggcatgtgattggaatgggcaccactcctgaagtgcactcaatattcctcgaaggtcacacatttcttgtgaggaaccatcgccaggctagcttggaaatctcgccaataactttccttactgctcaaacactcttgatggaccttggacagtttctactgttttgtcatatctcttcccaccaacatgatggcatggaagcttatgtcaaagtagacagctgtccagaggaaccccaactacgaatgaaaaataatgaagaagcggaagactatgatgatgatcttactgattctgaaatggatgtggtcaggtttgatgatgacaactctccttcctttatccaaattcgctcagttgccaagaagcatcctaaaacttgggtacattacattgctgctgaagaggaggactgggactatgctcccttagtcctcgcccccgatgacagaagttataaaagtcaatatttgaacaatggccctcagcggattggtaggaagtacaaaaaagtccgatttatggcatacacagatgaaacctttaagactcgtgaagctattcagcatgaatcaggaatcttgggacctttactttatggggaagttggagacacactgttgattatatttaagaatcaagcaagcagaccatataacatctaccctcacggaatcactgatgtccgtcctttgtattcaaggagattaccaaaaggtgtaaaacatttgaaggattttccaattctgccaggagaaatattcaaatataaatggacagtgactgtagaagatgggccaactaaatcagatcctcggtgcctgacccgctattactctagtttcgttaatatggagagagatctagcttcaggactcattggccctctcctcatctgctacaaagaatctgtagatcaaagaggaaaccagataatgtcagacaagaggaatgtcatcctgttttctgtatttgatgagaaccgaagctggtacctcacagagaatatacaacgctttctccccaatccagctggagtgcagcttgaggatccagagttccaagcctccaacatcatgcacagcatcaatggctatgtttttgatagtttgcagttgtcagtttgtttgcatgaggtggcatactggtacattctaagcattggagcacagactgacttcctttctgtcttcttctctggatataccttcaaacacaaaatggtctatgaagacacactcaccctattcccattctcaggagaaactgtcttcatgtcgatggaaaacccaggtctatggattctggggtgccacaactcagactttcggaacagaggcatgaccgccttactgaaggtttctagttgtgacaagaacactggtgattattacgaggacagttatgaagatatttcagcatacttgctgagtaaaaacaatgccattgaaccaagaagcttctctcaaaacggcgcgccaccgggagcgtcacccggtacgtcctcaacggggagccctggggcatcacccggcacgtcctcgacagggtcccccggaacaccgggttcggggactgcgtcgtcgtcacccggttcgtcaacacccagcggtgcgacgggttccccgggaacccccggatcaggaacagcgtcgtcgagccccggaagctcgaccccgtcaggagcgaccgggtcgccaggaacgcctgggtcgggtactgcctcatcgtcgccgggttcatcgacgccctccggagcaacaggttcacccgggtcgtccacccccagcggagcgactggatcaccgggatcgagcccgtcggcatcgacaggaacaggtcccggtagctccccatcggcctccacggggacggggcctggtgcgtcaccggggacaagcagcacgggttcgccgggaacgccagggtcagggaccgcgtcgtcgagcccagggtcgtccaccccaagcggggctactgggtccccgggtagctcgccgagcgcatcaacgggaaccggaccgggcagctccccctcagcgtcgacagggacaggccctggcgcgagcccgggaacatcgtcgacggggtcacccggagcatcgccagggacctcgtcaactggctcgcctggatcgtcaacgccctcgggagccacggggtcgcccggatcatccccgtccgcctcaactggcacaggccctggtgcttcccctggaacgtccagcacaggctcccccggttccagcccttccgcttcgactgggactggacccggaaccccgggatcggggacagcgtcaagctcgcccggaagctccacgccttcgggggcaaccgggtcagcctcgagcccaccagtcttgaaacgccatcaagctgaaataactcgtactactcttcagtcagatcaagaggaaatcgattatgatgataccatatcagttgaaatgaagaaggaagattttgacatttatgatgaggatgaaaatcagagcccccgcagctttcaaaagaaaacacgacactattttattgctgcagtggagaggctctgggattatgggatgagtagctccccacatgttctaagaaacagggctcagagtggcagtgtccctcagttcaagaaagttgttttccaggaatttactgatggctcctttactcagcccttataccgtggagaactaaatgaacatttgggactcctggggccatatataagagcagaagttgaagataatatcatggtaactttcagaaatcaggcctctcgtccctattccttctattctagccttatttcttatgaggaagatcagaggcaaggagcagaacctagaaaaaactttgtcaagcctaatgaaaccaaaacttacttttggaaagtgcaacatcatatggcacccactaaagatgagtttgactgcaaagcctgggcttatttctctgatgttgacctggaaaaagatgtgcactcaggcctgattggaccccttctggtctgccacactaacacactgaaccctgctcatgggagacaagtgacagtacaggaatttgctctgtttttcaccatctttgatgagaccaaaagctggtacttcactgaaaatatggaaagaaactgcaggggcgcgccaggttctcctgctggctcccccacctcaacagaagaggggacaagcgaaagcgctacgcctgagagtggccctggctctgagccagccacctccggctctgaaacccctgcctcgagcgctccctgcaatatccagatggaagatcccacttttaaagagaattatcgcttccatgcaatcaatggctacataatggatacactacctggcttagtaatggctcaggatcaaaggattcgatggtatctgctcagcatgggcagcaatgaaaacatccattctattcatttcagtggacatgtgttcactgtacgaaaaaaagaggagtataaaatggcactgtacaatctctatccaggtgtttttgagacagtggaaatgttaccatccaaagctggaatttggcgggtggaatgccttattggcgagcatctacatgctgggatgagcacactttttctggtgtacagcaataagtgtcagactcccctgggaatggcttctggacacattagagattttcagattacagcttcaggacaatatggacagtgggccccaaagctggccagacttcattattccggatcaatcaatgcctggagcaccaaggagcccttttcttggatcaaggtggatctgttggcaccaatgattattcacggcatcaagacccagggtgcccgtcagaagttctccagcctctacatctctcagtttatcatcatgtatagtcttgatgggaagaagtggcagacttatcgaggaaattccactggaaccttaatggtcttctttggcaatgtggattcatctgggataaaacacaatatttttaaccctccaattattgctcgatacatccgtttgcacccaactcattatagcattcgcagcactcttcgcatggagttgatgggctgtgatttaaatagttgcagcatgccattgggaatggagagtaaagcaatatcagatgcacagattactgcttcatcctactttaccaatatgtttgccacctggtctccttcaaaagctcgacttcacctccaagggaggagtaatgcctggagacctcaggtgaataatccaaaagagtggctgcaagtggacttccagaagacaatgaaagtcacaggagtaactactcagggagtaaaatctctgcttaccagcatgtatgtgaaggagttcctcatctccagcagtcaagatggccatcagtggactctcttttttcagaatggcaaagtaaaggtttttcagggaaatcaagactccttcacacctgtggtgaactctctagacccaccgttactgactcgctaccttcgaattcacccccagagttgggtgcaccagattgccctgaggatggaggttctgggctgcgaggcacaggacctctacggcgccggatcacctggggccgaaacggccgaacaaaaactcatctcagaagaggatctgtcacctgcaaccggtcatcatcaccatcaccattga

SEQ ID NO: 1417 - protein, 1913 aa, synthetic construct
  REGION 1..1913: note = Description of Artificial Sequence: Synthetic polypeptide
ATRRYYLGAVELSWDYMQSDLGELPVDARFPPRVPKSFPFNTSVVYKKTLFVEFTDHLFNIAKPRPPWMGLLGPTIQAEVYDTVVITLKNMASHPVSLHAVGVSYWKASEGAEYDDQTSQREKEDDKVFPGGSHTYVWQVLKENGPMASDPLCLTYSYLSHVDLVKDLNSGLIGALLVCREGSLAKEKTQTLHKFILLFAVFDEGKSWHSETKNSLMQDRDAASARAWPKMHTVNGYVNRSLPGLIGCHRKSVYWHVIGMGTTPEVHSIFLEGHTFLVRNHRQASLEISPITFLTAQTLLMDLGQFLLFCHISSHQHDGMEAYVKVDSCPEEPQLRMKNNEEAEDYDDDLTDSEMDVVRFDDDNSPSFIQIRSVAKKHPKTWVHYIAAEEEDWDYAPLVLAPDDRSYKSQYLNNGPQRIGRKYKKVRFMAYTDETFKTREAIQHESGILGPLLYGEVGDTLLIIFKNQASRPYNIYPHGITDVRPLYSRRLPKGVKHLKDFPILPGEIFKYKWTVTVEDGPTKSDPRCLTRYYSSFVNMERDLASGLIGPLLICYKESVDQRGNQIMSDKRNVILFSVFDENRSWYLTENIQRFLPNPAGVQLEDPEFQASNIMHSINGYVFDSLQLSVCLHEVAYWYILSIGAQTDFLSVFFSGYTFKHKMVYEDTLTLFPFSGETVFMSMENPGLWILGCHNSDFRNRGMTALLKVSSCDKNTGDYYEDSYEDISAYLLSKNNAIEPRSFSQNGAPPGASPGTSSTGSPGASPGTSSTGSPGTPGSGTASSSPGSSTPSGATGSPGTPGSGTASSSPGSSTPSGATGSPGTPGSGTASSSPGSSTPSGATGSPGSSTPSGATGSPGSSPSASTGTGPGSSPSASTGTGPGASPGTSSTGSPGTPGSGTASSSPGSSTPSGATGSPGSSPSASTGTGPGSSPSASTGTGPGASPGTSSTGSPGASPGTSSTGSPGSSTPSGATGSPGSSPSASTGTGPGASPGTSSTGSPGSSPSASTGTGPGTPGSGTASSSPGSSTPSGATGSASSPPVLKRHQAEITRTTLQSDQEEIDYDDTISVEMKKEDFDIYDEDENQSPRSFQKKTRHYFIAAVERLWDYGMSSSPHVLRNRAQSGSVPQFKKVVFQEFTDGSFTQPLYRGELNEHLGLLGPYIRAEVEDNIMVTFRNQASRPYSFYSSLISYEEDQRQGAEPRKNFVKPNETKTYFWKVQHHMAPTKDEFDCKAWAYFSDVDLEKDVHSGLIGPLLVCHTNTLNPAHGRQVTVQEFALFFTIFDETKSWYFTENMERNCRGAPGTPGSGTASSSPGASPGTSSTGSPGASPGTSSTGSPGASPGTSSTGSPGSSPSASTGTGPGTPGSGTASSSPGASPGTSSTGSPGASPGTSSTGSPGASPGTSSTGSPGSSTPSGATGSPGSSTPSGATGSPGASPGTSSTGSPASSAPCNIQMEDPTFKENYRFHAINGYIMDTLPGLVMAQDQRIRWYLLSMGSNENIHSIHFSGHVFTVRKKEEYKMALYNLYPGVFETVEMLPSKAGIWRVECLIGEHLHAGMSTLFLVYSNKCQTPLGMASGHIRDFQITASGQYGQWAPKLARLHYSGSINAWSTKEPFSWIKVDLLAPMIIHGIKTQGARQKFSSLYISQFIIMYSLDGKKWQTYRGNSTGTLMVFFGNVDSSGIKHNIFNPPIIARYIRLHPTHYSIRSTLRMELMGCDLNSCSMPLGMESKAISDAQITASSYFTNMFATWSPSKARLHLQGRSNAWRPQVNNPKEWLQVDFQKTMKVTGVTTQGVKSLLTSMYVKEFLISSSQDGHQWTLFFQNGKVKVFQGNQDSFTPVVNSLDPPLLTRYLRIHPQSWVHQIALRMEVLGCEAQDLYGAGSPGAETAEQKLISEEDLSPATGHHHHHH

SEQ ID NO: 1418 - DNA, 5742 bp, synthetic construct
  misc_feature 1..5742: note = Description of Artificial Sequence: Synthetic polynucleotide
  source 1..5742: mol_type = other DNA
gccaccagaagatactacctgggtgcagtggaactgtcatgggactatatgcaaagtgatctcggtgagctgcctgtggacgcaagatttcctcctagagtgccaaaatcttttccattcaacacctcagtcgtgtacaaaaagactctgtttgtagaattcacggatcaccttttcaacatcgctaagccaaggccaccctggatgggtctgctaggtcctaccatccaggctgaggtttatgatacagtggtcattacacttaagaacatggcttcccatcctgtcagtcttcatgctgttggtgtatcctactggaaagcttctgagggagctgaatatgatgatcagaccagtcaaagggagaaagaagatgataaagtcttccctggtggaagccatacatatgtctggcaggtcctgaaagagaatggtccaatggcctctgacccactgtgccttacctactcatatctttctcatgtggacctggtaaaagacttgaattcaggcctcattggagccctactagtatgtagagaagggagtctggccaaggaaaagacacagaccttgcacaaatttatactactttttgctgtatttgatgaagggaaaagttggcactcagaaacaaagaactccttgatgcaggatagggatgctgcatctgctcgggcctggcctaaaatgcacacagtcaatggttatgtaaacaggtctctgccaggtctgattggatgccacaggaaatcagtctattggcatgtgattggaatgggcaccactcctgaagtgcactcaatattcctcgaaggtcacacatttcttgtgaggaaccatcgccaggctagcttggaaatctcgccaataactttccttactgctcaaacactcttgatggaccttggacagtttctactgttttgtcatatctcttcccaccaacatgatggcatggaagcttatgtcaaagtagacagctgtccagaggaaccccaactacgaatgaaaaataatgaagaagcggaagactatgatgatgatcttactgattctgaaatggatgtggtcaggtttgatgatgacaactctccttcctttatccaaattcgctcagttgccaagaagcatcctaaaacttgggtacattacattgctgctgaagaggaggactgggactatgctcccttagtcctcgcccccgatgacagaagttataaaagtcaatatttgaacaatggccctcagcggattggtaggaagtacaaaaaagtccgatttatggcatacacagatgaaacctttaagactcgtgaagctattcagcatgaatcaggaatcttgggacctttactttatggggaagttggagacacactgttgattatatttaagaatcaagcaagcagaccatataacatctaccctcacggaatcactgatgtccgtcctttgtattcaaggagattaccaaaaggtgtaaaacatttgaaggattttccaattctgccaggagaaatattcaaatataaatggacagtgactgtagaagatgggccaactaaatcagatcctcggtgcctgacccgctattactctagtttcgttaatatggagagagatctagcttcaggactcattggccctctcctcatctgctacaaagaatctgtagatcaaagaggaaaccagataatgtcagacaagaggaatgtcatcctgttttctgtatttgatgagaaccgaagctggtacctcacagagaatatacaacgctttctccccaatccagctggagtgcagcttgaggatccagagttccaagcctccaacatcatgcacagcatcaatggctatgtttttgatagtttgcagttgtcagtttgtttgcatgaggtggcatactggtacattctaagcattggagcacagactgacttcctttctgtcttcttctctggatataccttcaaacacaaaatggtctatgaagacacactcaccctattcccattctcaggagaaactgtcttcatgtcgatggaaaacccaggtctatggattctggggtgccacaactcagactttcggaacagaggcatgaccgccttactgaaggtttctagttgtgacaagaacactggtgattattacgaggacagttatgaagatatttcagcatacttgctgagtaaaaacaatgccattgaaccaagaagcttctctcaaaacggcgcgccaccgggagcgtcacccggtacgtcctcaacggggagccctggggcatcacccggcacgtcctcgacagggtcccccggaacaccgggttcggggactgcgtcgtcgtcacccggttcgtcaacacccagcggtgcgacgggttccccgggaacccccggatcaggaacagcgtcgtcgagccccggaagctcgaccccgtcaggagcgaccgggtcgccaggaacgcctgggtcgggtactgcctcatcgtcgccgggttcatcgacgccctccggagcaacaggttcacccgggtcgtccacccccagcggagcgactggatcaccgggatcgagcccgtcggcatcgacaggaacaggtcccggtagctccccatcggcctccacggggacggggcctggtgcgtcaccggggacaagcagcacgggttcgccgggaacgccagggtcagggaccgcgtcgtcgagcccagggtcgtccaccccaagcggggctactgggtccccgggtagctcgccgagcgcatcaacgggaaccggaccgggcagctccccctcagcgtcgacagggacaggccctggcgcgagcccgggaacatcgtcgacggggtcacccggagcatcgccagggacctcgtcaactggctcgcctggatcgtcaacgccctcgggagccacggggtcgcccggatcatccccgtccgcctcaactggcacaggccctggtgcttcccctggaacgtccagcacaggctcccccggttccagcccttccgcttcgactgggactggacccggaaccccgggatcggggacagcgtcaagctcgcccggaagctccacgccttcgggggcaaccgggtcagcctcgagcccaccagtcttgaaacgccatcaagctgaaataactcgtactactcttcagtcagatcaagaggaaatcgattatgatgataccatatcagttgaaatgaagaaggaagattttgacatttatgatgaggatgaaaatcagagcccccgcagctttcaaaagaaaacacgacactattttattgctgcagtggagaggctctgggattatgggatgagtagctccccacatgttctaagaaacagggctcagagtggcagtgtccctcagttcaagaaagttgttttccaggaatttactgatggctcctttactcagcccttataccgtggagaactaaatgaacatttgggactcctggggccatatataagagcagaagttgaagataatatcatggtaactttcagaaatcaggcctctcgtccctattccttctattctagccttatttcttatgaggaagatcagaggcaaggagcagaacctagaaaaaactttgtcaagcctaatgaaaccaaaacttacttttggaaagtgcaacatcatatggcacccactaaagatgagtttgactgcaaagcctgggcttatttctctgatgttgacctggaaaaagatgtgcactcaggcctgattggaccccttctggtctgccacactaacacactgaaccctgctcatgggagacaagtgacagtacaggaatttgctctgtttttcaccatctttgatgagaccaaaagctggtacttcactgaaaatatggaaagaaactgcaggggcgcgccaggtacacccggatcgggtacagcgtcatcgagccccggtgcgtcacctggtacgtcgagcacggggtcgccaggggcgtcccctgggacgtcctcaacaggctcgcccggtgcgtcacccggcacgtcgtccacgggttcacctggtagctccccttccgcgtccactggcaccgggcctggaactccggggagcggcacagcgagctcgtcgccgggagcatcgcctgggacatcgagcaccgggtcgccaggagcatcgcccggaacatccagcacaggaagccccggcgcgtcgcccgggacatcaagcacaggttccccgggatcgagcacgccgtccggagccactggatcaccagggagctcgacaccttccggcgcaacgggatcgcccggagccagcccgggtacgtcaagcactggctcccctgcctcgagcgctccctgcaatatccagatggaagatcccacttttaaagagaattatcgcttccatgcaatcaatggctacataatggatacactacctggcttagtaatggctcaggatcaaaggattcgatggtatctgctcagcatgggcagcaatgaaaacatccattctattcatttcagtggacatgtgttcactgtacgaaaaaaagaggagtataaaatggcactgtacaatctctatccaggtgtttttgagacagtggaaatgttaccatccaaagctggaatttggcgggtggaatgccttattggcgagcatctacatgctgggatgagcacactttttctggtgtacagcaataagtgtcagactcccctgggaatggcttctggacacattagagattttcagattacagcttcaggacaatatggacagtgggccccaaagctggccagacttcattattccggatcaatcaatgcctggagcaccaaggagcccttttcttggatcaaggtggatctgttggcaccaatgattattcacggcatcaagacccagggtgcccgtcagaagttctccagcctctacatctctcagtttatcatcatgtatagtcttgatgggaagaagtggcagacttatcgaggaaattccactggaaccttaatggtcttctttggcaatgtggattcatctgggataaaacacaatatttttaaccctccaattattgctcgatacatccgtttgcacccaactcattatagcattcgcagcactcttcgcatggagttgatgggctgtgatttaaatagttgcagcatgccattgggaatggagagtaaagcaatatcagatgcacagattactgcttcatcctactttaccaatatgtttgccacctggtctccttcaaaagctcgacttcacctccaagggaggagtaatgcctggagacctcaggtgaataatccaaaagagtggctgcaagtggacttccagaagacaatgaaagtcacaggagtaactactcagggagtaaaatctctgcttaccagcatgtatgtgaaggagttcctcatctccagcagtcaagatggccatcagtggactctcttttttcagaatggcaaagtaaaggtttttcagggaaatcaagactccttcacacctgtggtgaactctctagacccaccgttactgactcgctaccttcgaattcacccccagagttgggtgcaccagattgccctgaggatggaggttctgggctgcgaggcacaggacctctacggcgccggatcacctggggccgaaacggccgaacaaaaactcatctcagaagaggatctgtcacctgcaaccggtcatcatcaccatcaccattga

SEQ ID NO: 1419 - protein, 2057 aa, synthetic construct
  REGION 1..2057: note = Description of Artificial Sequence: Synthetic polypeptide
ATRRYYLGAVELSWDYMQSDLGELPVDARFPPRVPKSFPFNTSVVYKKTLFVEFTDHLFNIAKPRPPWMGLLGPTIQAEVYDTVVITLKNMASHPVSLHAVGVSYWKASEGAEYDDQTSQREKEDDKVFPGGSHTYVWQVLKENGPMASDPLCLTYSYLSHVDLVKDLNSGLIGALLVCREGSLAKEKTQTLHKFILLFAVFDEGKSWHSETKNSLMQDRDAASARAWPKMHTVNGYVNRSLPGLIGCHRKSVYWHVIGMGTTPEVHSIFLEGHTFLVRNHRQASLEISPITFLTAQTLLMDLGQFLLFCHISSHQHDGMEAYVKVDSCPEEPQLRMKNNEEAEDYDDDLTDSEMDVVRFDDDNSPSFIQIRSVAKKHPKTWVHYIAAEEEDWDYAPLVLAPDDRSYKSQYLNNGPQRIGRKYKKVRFMAYTDETFKTREAIQHESGILGPLLYGEVGDTLLIIFKNQASRPYNIYPHGITDVRPLYSRRLPKGVKHLKDFPILPGEIFKYKWTVTVEDGPTKSDPRCLTRYYSSFVNMERDLASGLIGPLLICYKESVDQRGNQIMSDKRNVILFSVFDENRSWYLTENIQRFLPNPAGVQLEDPEFQASNIMHSINGYVFDSLQLSVCLHEVAYWYILSIGAQTDFLSVFFSGYTFKHKMVYEDTLTLFPFSGETVFMSMENPGLWILGCHNSDFRNRGMTALLKVSSCDKNTGDYYEDSYEDISAYLLSKNNAIEPRSFSQNGAPPGASPGTSSTGSPGASPGTSSTGSPGTPGSGTASSSPGSSTPSGATGSPGTPGSGTASSSPGSSTPSGATGSPGTPGSGTASSSPGSSTPSGATGSPGSSTPSGATGSPGSSPSASTGTGPGSSPSASTGTGPGASPGTSSTGSPGTPGSGTASSSPGSSTPSGATGSPGSSPSASTGTGPGSSPSASTGTGPGASPGTSSTGSPGASPGTSSTGSPGSSTPSGATGSPGSSPSASTGTGPGASPGTSSTGSPGSSPSASTGTGPGTPGSGTASSSPGSSTPSGATGSASSPPVLKRHQAEITRTTLQSDQEEIDYDDTISVEMKKEDFDIYDEDENQSPRSFQKKTRHYFIAAVERLWDYGMSSSPHVLRNRAQSGSVPQFKKVVFQEFTDGSFTQPLYRGELNEHLGLLGPYIRAEVEDNIMVTFRNQASRPYSFYSSLISYEEDQRQGAEPRKNFVKPNETKTYFWKVQHHMAPTKDEFDCKAWAYFSDVDLEKDVHSGLIGPLLVCHTNTLNPAHGRQVTVQEFALFFTIFDETKSWYFTENMERNCRGAPGTPGSGTASSSPGSSTPSGATGSPGSSTPSGATGSPGSSTPSGATGSPGSSPSASTGTGPGASPGTSSTGSPGASPGTSSTGSPGTPGSGTASSSPGASPGTSSTGSPGASPGTSSTGSPGASPGTSSTGSPGASPGTSSTGSPGTPGSGTASSSPGSSTPSGATGSPGTPGSGTASSSPGSSTPSGATGSPGTPGSGTASSSPGSSTPSGATGSPGSSTPSGATGSPGSSPSASTGTGPGSSPSASTGTGPGASPGTSSTGSPGTPGSGTASSSPGSSTPSGATGSPASSAPCNIQMEDPTFKENYRFHAINGYIMDTLPGLVMAQDQRIRWYLLSMGSNENIHSIHFSGHVFTVRKKEEYKMALYNLYPGVFETVEMLPSKAGIWRVECLIGEHLHAGMSTLFLVYSNKCQTPLGMASGHIRDFQITASGQYGQWAPKLARLHYSGSINAWSTKEPFSWIKVDLLAPMIIHGIKTQGARQKFSSLYISQFIIMYSLDGKKWQTYRGNSTGTLMVFFGNVDSSGIKHNIFNPPIIARYIRLHPTHYSIRSTLRMELMGCDLNSCSMPLGMESKAISDAQITASSYFTNMFATWSPSKARLHLQGRSNAWRPQVNNPKEWLQVDFQKTMKVTGVTTQGVKSLLTSMYVKEFLISSSQDGHQWTLFFQNGKVKVFQGNQDSFTPVVNSLDPPLLTRYLRIHPQSWVHQIALRMEVLGCEAQDLYGAGSPGAETAEQKLISEEDLSPATGHHHHHH

SEQ ID NO: 1420 - DNA, 6174 bp, synthetic construct
  misc_feature 1..6174: note = Description of Artificial Sequence: Synthetic polynucleotide
  source 1..6174: mol_type = other DNA
gccaccagaagatactacctgggtgcagtggaactgtcatgggactatatgcaaagtgatctcggtgagctgcctgtggacgcaagatttcctcctagagtgccaaaatcttttccattcaacacctcagtcgtgtacaaaaagactctgtttgtagaattcacggatcaccttttcaacatcgctaagccaaggccaccctggatgggtctgctaggtcctaccatccaggctgaggtttatgatacagtggtcattacacttaagaacatggcttcccatcctgtcagtcttcatgctgttggtgtatcctactggaaagcttctgagggagctgaatatgatgatcagaccagtcaaagggagaaagaagatgataaagtcttccctggtggaagccatacatatgtctggcaggtcctgaaagagaatggtccaatggcctctgacccactgtgccttacctactcatatctttctcatgtggacctggtaaaagacttgaattcaggcctcattggagccctactagtatgtagagaagggagtctggccaaggaaaagacacagaccttgcacaaatttatactactttttgctgtatttgatgaagggaaaagttggcactcagaaacaaagaactccttgatgcaggatagggatgctgcatctgctcgggcctggcctaaaatgcacacagtcaatggttatgtaaacaggtctctgccaggtctgattggatgccacaggaaatcagtctattggcatgtgattggaatgggcaccactcctgaagtgcactcaatattcctcgaaggtcacacatttcttgtgaggaaccatcgccaggctagcttggaaatctcgccaataactttccttactgctcaaacactcttgatggaccttggacagtttctactgttttgtcatatctcttcccaccaacatgatggcatggaagcttatgtcaaagtagacagctgtccagaggaaccccaactacgaatgaaaaataatgaagaagcggaagactatgatgatgatcttactgattctgaaatggatgtggtcaggtttgatgatgacaactctccttcctttatccaaattcgctcagttgccaagaagcatcctaaaacttgggtacattacattgctgctgaagaggaggactgggactatgctcccttagtcctcgcccccgatgacagaagttataaaagtcaatatttgaacaatggccctcagcggattggtaggaagtacaaaaaagtccgatttatggcatacacagatgaaacctttaagactcgtgaagctattcagcatgaatcaggaatcttgggacctttactttatggggaagttggagacacactgttgattatatttaagaatcaagcaagcagaccatataacatctaccctcacggaatcactgatgtccgtcctttgtattcaaggagattaccaaaaggtgtaaaacatttgaaggattttccaattctgccaggagaaatattcaaatataaatggacagtgactgtagaagatgggccaactaaatcagatcctcggtgcctgacccgctattactctagtttcgttaatatggagagagatctagcttcaggactcattggccctctcctcatctgctacaaagaatctgtagatcaaagaggaaaccagataatgtcagacaagaggaatgtcatcctgttttctgtatttgatgagaaccgaagctggtacctcacagagaatatacaacgctttctccccaatccagctggagtgcagcttgaggatccagagttccaagcctccaacatcatgcacagcatcaatggctatgtttttgatagtttgcagttgtcagtttgtttgcatgaggtggcatactggtacattctaagcattggagcacagactgacttcctttctgtcttcttctctggatataccttcaaacacaaaatggtctatgaagacacactcaccctattcccattctcaggagaaactgtcttcatgtcgatggaaaacccaggtctatggattctggggtgccacaactcagactttcggaacagaggcatgaccgccttactgaaggtttctagttgtgacaagaacactggtgattattacgaggacagttatgaagatatttcagcatacttgctgagtaaaaacaatgccattgaaccaagaagcttctctcaaaacggcgcgccaccgggagcgtcacccggtacgtcctcaacggggagccctggggcatcacccggcacgtcctcgacagggtcccccggaacaccgggttcggggactgcgtcgtcgtcacccggttcgtcaacacccagcggtgcgacgggttccccgggaacccccggatcaggaacagcgtcgtcgagccccggaagctcgaccccgtcaggagcgaccgggtcgccaggaacgcctgggtcgggtactgcctcatcgtcgccgggttcatcgacgccctccggagcaacaggttcacccgggtcgtccacccccagcggagcgactggatcaccgggatcgagcccgtcggcatcgacaggaacaggtcccggtagctccccatcggcctccacggggacggggcctggtgcgtcaccggggacaagcagcacgggttcgccgggaacgccagggtcagggaccgcgtcgtcgagcccagggtcgtccaccccaagcggggctactgggtccccgggtagctcgccgagcgcatcaacgggaaccggaccgggcagctccccctcagcgtcgacagggacaggccctggcgcgagcccgggaacatcgtcgacggggtcacccggagcatcgccagggacctcgtcaactggctcgcctggatcgtcaacgccctcgggagccacggggtcgcccggatcatccccgtccgcctcaactggcacaggccctggtgcttcccctggaacgtccagcacaggctcccccggttccagcccttccgcttcgactgggactggacccggaaccccgggatcggggacagcgtcaagctcgcccggaagctccacgccttcgggggcaaccgggtcagcctcgagcccaccagtcttgaaacgccatcaagctgaaataactcgtactactcttcagtcagatcaagaggaaatcgattatgatgataccatatcagttgaaatgaagaaggaagattttgacatttatgatgaggatgaaaatcagagcccccgcagctttcaaaagaaaacacgacactattttattgctgcagtggagaggctctgggattatgggatgagtagctccccacatgttctaagaaacagggctcagagtggcagtgtccctcagttcaagaaagttgttttccaggaatttactgatggctcctttactcagcccttataccgtggagaactaaatgaacatttgggactcctggggccatatataagagcagaagttgaagataatatcatggtaactttcagaaatcaggcctctcgtccctattccttctattctagccttatttcttatgaggaagatcagaggcaaggagcagaacctagaaaaaactttgtcaagcctaatgaaaccaaaacttacttttggaaagtgcaacatcatatggcacccactaaagatgagtttgactgcaaagcctgggcttatttctctgatgttgacctggaaaaagatgtgcactcaggcctgattggaccccttctggtctgccacactaacacactgaaccctgctcatgggagacaagtgacagtacaggaatttgctctgtttttcaccatctttgatgagaccaaaagctggtacttcactgaaaatatggaaagaaactgcaggggcgcgccaggtacgcccgggtcgggaacagcgtcctcaagcccgggtagctcgacgccgtcaggagccacagggtcgccgggatcgtcgactccatcaggcgcaacgggatcgcctggatcaagcactccatccggagcgacgggaagcccagggagctccccgtccgcatcgactgggacgggacctggagcaagccccggtacgtcgtcaacaggttcgcctggtgcctcgcctggcacgtccagcacggggagccccggaacgccgggttccggaaccgcatcctcctcaccaggtgcctcaccgggcacctcatcaacgggatcaccaggggcttcaccgggaacgagctcgacgggttcaccgggagcgtccccggggacttcgtcgacaggtagcccaggggcaagccccggtacatcgtcaacgggttccccagggacaccggggagcggtactgcatcgtcctcacccggttcctcgacacccagcggagccacgggttcgcccggtactccggggtccggaacggccagcagctcacccggttcctcgacgccatcaggtgccacgggctcgcctggaacgccaggctcgggcactgcgagcagcagccctggatcatcaacgcctagcggagcgaccggctcccctggatcgtcaactccctcgggcgcgactgggagcccaggaagctcaccgtcggcctcgacgggaacagggcctggttcgagcccctcagcttcaacaggaacaggtccaggcgcgtcgccaggtacatcatcgacgggttcgcctgggacccctgggtccggtactgcctcatcatcgcccggatcgtccaccccctcgggagcgacaggttcgcctgcctcgagcgctccctgcaatatccagatggaagatcccacttttaaagagaattatcgcttccatgcaatcaatggctacataatggatacactacctggcttagtaatggctcaggatcaaaggattcgatggtatctgctcagcatgggcagcaatgaaaacatccattctattcatttcagtggacatgtgttcactgtacgaaaaaaagaggagtataaaatggcactgtacaatctctatccaggtgtttttgagacagtggaaatgttaccatccaaagctggaatttggcgggtggaatgccttattggcgagcatctacatgctgggatgagcacactttttctggtgtacagcaataagtgtcagactcccctgggaatggcttctggacacattagagattttcagattacagcttcaggacaatatggacagtgggccccaaagctggccagacttcattattccggatcaatcaatgcctggagcaccaaggagcccttttcttggatcaaggtggatctgttggcaccaatgattattcacggcatcaagacccagggtgcccgtcagaagttctccagcctctacatctctcagtttatcatcatgtatagtcttgatgggaagaagtggcagacttatcgaggaaattccactggaaccttaatggtcttctttggcaatgtggattcatctgggataaaacacaatatttttaaccctccaattattgctcgatacatccgtttgcacccaactcattatagcattcgcagcactcttcgcatggagttgatgggctgtgatttaaatagttgcagcatgccattgggaatggagagtaaagcaatatcagatgcacagattactgcttcatcctactttaccaatatgtttgccacctggtctccttcaaaagctcgacttcacctccaagggaggagtaatgcctggagacctcaggtgaataatccaaaagagtggctgcaagtggacttccagaagacaatgaaagtcacaggagtaactactcagggagtaaaatctctgcttaccagcatgtatgtgaaggagttcctcatctccagcagtcaagatggccatcagtggactctcttttttcagaatggcaaagtaaaggtttttcagggaaatcaagactccttcacacctgtggtgaactctctagacccaccgttactgactcgctaccttcgaattcacccccagagttgggtgcaccagattgccctgaggatggaggttctgggctgcgaggcacaggacctctacggcgccggatcacctggggccgaaacggccgaacaaaaactcatctcagaagaggatctgtcacctgcaaccggtcatcatcaccatcaccattga

SEQ ID NO: 1421 - protein, 1585 aa, synthetic construct
  REGION 1..1585: note = Description of Artificial Sequence: Synthetic polypeptide
ATRRYYLGAVELSWDYMQSDLGELPVDARFPPRVPKSFPFNTSVVYKKTLFVEFTDHLFNIAKPRPPWMGLLGPTIQAEVYDTVVITLKNMASHPVSLHAVGVSYWKASEGAEYDDQTSQREKEDDKVFPGGSHTYVWQVLKENGPMASDPLCLTYSYLSHVDLVKDLNSGLIGALLVCREGSLAKEKTQTLHKFILLFAVFDEGKSWHSETKNSLMQDRDAASARAWPKMHTVNGYVNRSLPGLIGCHRKSVYWHVIGMGTTPEVHSIFLEGHTFLVRNHRQASLEISPITFLTAQTLLMDLGQFLLFCHISSHQHDGMEAYVKVDSCPEEPQLRMKNNEEAEDYDDDLTDSEMDVVRFDDDNSPSFIQIRSVAKKHPKTWVHYIAAEEEDWDYAPLVLAPDDRSYKSQYLNNGPQRIGRKYKKVRFMAYTDETFKTREAIQHESGILGPLLYGEVGDTLLIIFKNQASRPYNIYPHGITDVRPLYSRRLPKGVKHLKDFPILPGEIFKYKWTVTVEDGPTKSDPRCLTRYYSSFVNMERDLASGLIGPLLICYKESVDQRGNQIMSDKRNVILFSVFDENRSWYLTENIQRFLPNPAGVQLEDPEFQASNIMHSINGYVFDSLQLSVCLHEVAYWYILSIGAQTDFLSVFFSGYTFKHKMVYEDTLTLFPFSGETVFMSMENPGLWILGCHNSDFRNRGMTALLKVSSCDKNTGDYYEDSYEDISAYLLSKNNAIEPRSFSQNGAPGSPAGSPTSTEEGTSESATPESGPGSEPATSGSETPASSPPVLKRHQAEITRTTLQSDQEEIDYDDTISVEMKKEDFDIYDEDENQSPRSFQKKTRHYFIAAVERLWDYGMSSSPHVLRNRAQSGSVPQFKKVVFQEFTDGSFTQPLYRGELNEHLGLLGPYIRAEVEDNIMVTFRNQASRPYSFYSSLISYEEDQRQGAEPRKNFVKPNETKTYFWKVQHHMAPTKDEFDCKAWAYFSDVDLEKDVHSGLIGPLLVCHTNTLNPAHGRQVTVQEFALFFTIFDETKSWYFTENMERNCRGAPGSPAGSPTSTEEGTSESATPESGPGSEPATSGSETPASSAPCNIQMEDPTFKENYRFHAINGYIMDTLPGLVMAQDQRIRWYLLSMGSNENIHSIHFSGHVFTVRKKEEYKMALYNLYPGVFETVEMLPSKAGIWRVECLIGEHLHAGMSTLFLVYSNKCQTPLGMASGHIRDFQITASGQYGQWAPKLARLHYSGSINAWSTKEPFSWIKVDLLAPMIIHGIKTQGARQKFSSLYISQFIIMYSLDGKKWQTYRGNSTGTLMVFFGNVDSSGIKHNIFNPPIIARYIRLHPTHYSIRSTLRMELMGCDLNSCSMPLGMESKAISDAQITASSYFTNMFATWSPSKARLHLQGRSNAWRPQVNNPKEWLQVDFQKTMKVTGVTTQGVKSLLTSMYVKEFLISSSQDGHQWTLFFQNGKVKVFQGNQDSFTPVVNSLDPPLLTRYLRIHPQSWVHQIALRMEVLGCEAQDLYGAPGSPAGSPTSTEEGTSESATPESGPGSEPATSGSETPASSEQKLISEEDLSPATGHHHHHH

SEQ ID NO: 1422 - DNA, 4758 bp, synthetic construct
  misc_feature 1..4758: note = Description of Artificial Sequence: Synthetic polynucleotide
  source 1..4758: mol_type = other DNA
gccaccagaagatactacctgggtgcagtggaactgtcatgggactatatgcaaagtgatctcggtgagctgcctgtggacgcaagatttcctcctagagtgccaaaatcttttccattcaacacctcagtcgtgtacaaaaagactctgtttgtagaattcacggatcaccttttcaacatcgctaagccaaggccaccctggatgggtctgctaggtcctaccatccaggctgaggtttatgatacagtggtcattacacttaagaacatggcttcccatcctgtcagtcttcatgctgttggtgtatcctactggaaagcttctgagggagctgaatatgatgatcagaccagtcaaagggagaaagaagatgataaagtcttccctggtggaagccatacatatgtctggcaggtcctgaaagagaatggtccaatggcctctgacccactgtgccttacctactcatatctttctcatgtggacctggtaaaagacttgaattcaggcctcattggagccctactagtatgtagagaagggagtctggccaaggaaaagacacagaccttgcacaaatttatactactttttgctgtatttgatgaagggaaaagttggcactcagaaacaaagaactccttgatgcaggatagggatgctgcatctgctcgggcctggcctaaaatgcacacagtcaatggttatgtaaacaggtctctgccaggtctgattggatgccacaggaaatcagtctattggcatgtgattggaatgggcaccactcctgaagtgcactcaatattcctcgaaggtcacacatttcttgtgaggaaccatcgccaggctagcttggaaatctcgccaataactttccttactgctcaaacactcttgatggaccttggacagtttctactgttttgtcatatctcttcccaccaacatgatggcatggaagcttatgtcaaagtagacagctgtccagaggaaccccaactacgaatgaaaaataatgaagaagcggaagactatgatgatgatcttactgattctgaaatggatgtggtcaggtttgatgatgacaactctccttcctttatccaaattcgctcagttgccaagaagcatcctaaaacttgggtacattacattgctgctgaagaggaggactgggactatgctcccttagtcctcgcccccgatgacagaagttataaaagtcaatatttgaacaatggccctcagcggattggtaggaagtacaaaaaagtccgatttatggcatacacagatgaaacctttaagactcgtgaagctattcagcatgaatcaggaatcttgggacctttactttatggggaagttggagacacactgttgattatatttaagaatcaagcaagcagaccatataacatctaccctcacggaatcactgatgtccgtcctttgtattcaaggagattaccaaaaggtgtaaaacatttgaaggattttccaattctgccaggagaaatattcaaatataaatggacagtgactgtagaagatgggccaactaaatcagatcctcggtgcctgacccgctattactctagtttcgttaatatggagagagatctagcttcaggactcattggccctctcctcatctgctacaaagaatctgtagatcaaagaggaaaccagataatgtcagacaagaggaatgtcatcctgttttctgtatttgatgagaaccgaagctggtacctcacagagaatatacaacgctttctccccaatccagctggagtgcagcttgaggatccagagttccaagcctccaacatcatgcacagcatcaatggctatgtttttgatagtttgcagttgtcagtttgtttgcatgaggtggcatactggtacattctaagcattggagcacagactgacttcctttctgtcttcttctctggatataccttcaaacacaaaatggtctatgaagacacactcaccctattcccattctcaggagaaactgtcttcatgtcgatggaaaacccaggtctatggattctggggtgccacaactcagactttcggaacagaggcatgaccgccttactgaaggtttctagttgtgacaagaacactggtgattattacgaggacagttatgaagatatttcagcatacttgctgagtaaaaacaatgccattgaaccaagaagcttctctcaaaacggcgcgccaggttctcctgctggctcccccacctcaacagaagaggggacaagcgaaagcgctacgcctgagagtggccctggctctgagccagccacctccggctctgaaacccctgcctcgagcccaccagtcttgaaacgccatcaagctgaaataactcgtactactcttcagtcagatcaagaggaaatcgattatgatgataccatatcagttgaaatgaagaaggaagattttgacatttatgatgaggatgaaaatcagagcccccgcagctttcaaaagaaaacacgacactattttattgctgcagtggagaggctctgggattatgggatgagtagctccccacatgttctaagaaacagggctcagagtggcagtgtccctcagttcaagaaagttgttttccaggaatttactgatggctcctttactcagcccttataccgtggagaactaaatgaacatttgggactcctggggccatatataagagcagaagttgaagataatatcatggtaactttcagaaatcaggcctctcgtccctattccttctattctagccttatttcttatgaggaagatcagaggcaaggagcagaacctagaaaaaactttgtcaagcctaatgaaaccaaaacttacttttggaaagtgcaacatcatatggcacccactaaagatgagtttgactgcaaagcctgggcttatttctctgatgttgacctggaaaaagatgtgcactcaggcctgattggaccccttctggtctgccacactaacacactgaaccctgctcatgggagacaagtgacagtacaggaatttgctctgtttttcaccatctttgatgagaccaaaagctggtacttcactgaaaatatggaaagaaactgcaggggcgcgccaggttctcctgctggctcccccacctcaacagaagaggggacaagcgaaagcgctacgcctgagagtggccctggctctgagccagccacctccggctctgaaacccctgcctcgagcgctccctgcaatatccagatggaagatcccacttttaaagagaattatcgcttccatgcaatcaatggctacataatggatacactacctggcttagtaatggctcaggatcaaaggattcgatggtatctgctcagcatgggcagcaatgaaaacatccattctattcatttcagtggacatgtgttcactgtacgaaaaaaagaggagtataaaatggcactgtacaatctctatccaggtgtttttgagacagtggaaatgttaccatccaaagctggaatttggcgggtggaatgccttattggcgagcatctacatgctgggatgagcacactttttctggtgtacagcaataagtgtcagactcccctgggaatggcttctggacacattagagattttcagattacagcttcaggacaatatggacagtgggccccaaagctggccagacttcattattccggatcaatcaatgcctggagcaccaaggagcccttttcttggatcaaggtggatctgttggcaccaatgattattcacggcatcaagacccagggtgcccgtcagaagttctccagcctctacatctctcagtttatcatcatgtatagtcttgatgggaagaagtggcagacttatcgaggaaattccactggaaccttaatggtcttctttggcaatgtggattcatctgggataaaacacaatatttttaaccctccaattattgctcgatacatccgtttgcacccaactcattatagcattcgcagcactcttcgcatggagttgatgggctgtgatttaaatagttgcagcatgccattgggaatggagagtaaagcaatatcagatgcacagattactgcttcatcctactttaccaatatgtttgccacctggtctccttcaaaagctcgacttcacctccaagggaggagtaatgcctggagacctcaggtgaataatccaaaagagtggctgcaagtggacttccagaagacaatgaaagtcacaggagtaactactcagggagtaaaatctctgcttaccagcatgtatgtgaaggagttcctcatctccagcagtcaagatggccatcagtggactctcttttttcagaatggcaaagtaaaggtttttcagggaaatcaagactccttcacacctgtggtgaactctctagacccaccgttactgactcgctaccttcgaattcacccccagagttgggtgcaccagattgccctgaggatggaggttctgggctgcgaggcacaggacctctacggcgcgccaggttctcctgctggctcccccacctcaacagaagaggggacaagcgaaagcgctacgcctgagagtggccctggctctgagccagccacctccggctctgaaacccctgcctcgagcgaacaaaaactcatctcagaagaggatctgtcacctgcaaccggtcatcatcaccatcaccattga

SEQ ID NO: 1423 - protein, 1693 aa, synthetic construct
  REGION 1..1693: note = Description of Artificial Sequence: Synthetic polypeptide
ATRRYYLGAVELSWDYMQSDLGELPVDARFPPRVPKSFPFNTSVVYKKTLFVEFTDHLFNIAKPRPPWMGLLGPTIQAEVYDTVVITLKNMASHPVSLHAVGVSYWKASEGAEYDDQTSQREKEDDKVFPGGSHTYVWQVLKENGPMASDPLCLTYSYLSHVDLVKDLNSGLIGALLVCREGSLAKEKTQTLHKFILLFAVFDEGKSWHSETKNSLMQDRDAASARAWPKMHTVNGYVNRSLPGLIGCHRKSVYWHVIGMGTTPEVHSIFLEGHTFLVRNHRQASLEISPITFLTAQTLLMDLGQFLLFCHISSHQHDGMEAYVKVDSCPEEPQLRMKNNEEAEDYDDDLTDSEMDVVRFDDDNSPSFIQIRSVAKKHPKTWVHYIAAEEEDWDYAPLVLAPDDRSYKSQYLNNGPQRIGRKYKKVRFMAYTDETFKTREAIQHESGILGPLLYGEVGDTLLIIFKNQASRPYNIYPHGITDVRPLYSRRLPKGVKHLKDFPILPGEIFKYKWTVTVEDGPTKSDPRCLTRYYSSFVNMERDLASGLIGPLLICYKESVDQRGNQIMSDKRNVILFSVFDENRSWYLTENIQRFLPNPAGVQLEDPEFQASNIMHSINGYVFDSLQLSVCLHEVAYWYILSIGAQTDFLSVFFSGYTFKHKMVYEDTLTLFPFSGETVFMSMENPGLWILGCHNSDFRNRGMTALLKVSSCDKNTGDYYEDSYEDISAYLLSKNNAIEPRSFSQNGAPGSPAGSPTSTEEGTSESATPESGPGSEPATSGSETPASSPPVLKRHQAEITRTTLQSDQEEIDYDDTISVEMKKEDFDIYDEDENQSPRSFQKKTRHYFIAAVERLWDYGMSSSPHVLRNRAQSGSVPQFKKVVFQEFTDGSFTQPLYRGELNEHLGLLGPYIRAEVEDNIMVTFRNQASRPYSFYSSLISYEEDQRQGAEPRKNFVKPNETKTYFWKVQHHMAPTKDEFDCKAWAYFSDVDLEKDVHSGLIGPLLVCHTNTLNPAHGRQVTVQEFALFFTIFDETKSWYFTENMERNCRGAPGTPGSGTASSSPGASPGTSSTGSPGASPGTSSTGSPGASPGTSSTGSPGSSPSASTGTGPGTPGSGTASSSPGASPGTSSTGSPGASPGTSSTGSPGASPGTSSTGSPGSSTPSGATGSPGSSTPSGATGSPGASPGTSSTGSPASSAPCNIQMEDPTFKENYRFHAINGYIMDTLPGLVMAQDQRIRWYLLSMGSNENIHSIHFSGHVFTVRKKEEYKMALYNLYPGVFETVEMLPSKAGIWRVECLIGEHLHAGMSTLFLVYSNKCQTPLGMASGHIRDFQITASGQYGQWAPKLARLHYSGSINAWSTKEPFSWIKVDLLAPMIIHGIKTQGARQKFSSLYISQFIIMYSLDGKKWQTYRGNSTGTLMVFFGNVDSSGIKHNIFNPPIIARYIRLHPTHYSIRSTLRMELMGCDLNSCSMPLGMESKAISDAQITASSYFTNMFATWSPSKARLHLQGRSNAWRPQVNNPKEWLQVDFQKTMKVTGVTTQGVKSLLTSMYVKEFLISSSQDGHQWTLFFQNGKVKVFQGNQDSFTPVVNSLDPPLLTRYLRIHPQSWVHQIALRMEVLGCEAQDLYGAPGSPAGSPTSTEEGTSESATPESGPGSEPATSGSETPASSEQKLISEEDLSPATGHHHHHH

SEQ ID NO: 1424 - DNA, 5082 bp, synthetic construct
  misc_feature 1..5082: note = Description of Artificial Sequence: Synthetic polynucleotide
  source 1..5082: mol_type = other DNA
gccaccagaagatactacctgggtgcagtggaactgtcatgggactatatgcaaagtgatctcggtgagctgcctgtggacgcaagatttcctcctagagtgccaaaatcttttccattcaacacctcagtcgtgtacaaaaagactctgtttgtagaattcacggatcaccttttcaacatcgctaagccaaggccaccctggatgggtctgctaggtcctaccatccaggctgaggtttatgatacagtggtcattacacttaagaacatggcttcccatcctgtcagtcttcatgctgttggtgtatcctactggaaagcttctgagggagctgaatatgatgatcagaccagtcaaagggagaaagaagatgataaagtcttccctggtggaagccatacatatgtctggcaggtcctgaaagagaatggtccaatggcctctgacccactgtgccttacctactcatatctttctcatgtggacctggtaaaagacttgaattcaggcctcattggagccctactagtatgtagagaagggagtctggccaaggaaaagacacagaccttgcacaaatttatactactttttgctgtatttgatgaagggaaaagttggcactcagaaacaaagaactccttgatgcaggatagggatgctgcatctgctcgggcctggcctaaaatgcacacagtcaatggttatgtaaacaggtctctgccaggtctgattggatgccacaggaaatcagtctattggcatgtgattggaatgggcaccactcctgaagtgcactcaatattcctcgaaggtcacacatttcttgtgaggaaccatcgccaggctagcttggaaatctcgccaataactttccttactgctcaaacactcttgatggaccttggacagtttctactgttttgtcatatctcttcccaccaacatgatggcatggaagcttatgtcaaagtagacagctgtccagaggaaccccaactacgaatgaaaaataatgaagaagcggaagactatgatgatgatcttactgattctgaaatggatgtggtcaggtttgatgatgacaactctccttcctttatccaaattcgctcagttgccaagaagcatcctaaaacttgggtacattacattgctgctgaagaggaggactgggactatgctcccttagtcctcgcccccgatgacagaagttataaaagtcaatatttgaacaatggccctcagcggattggtaggaagtacaaaaaagtccgatttatggcatacacagatgaaacctttaagactcgtgaagctattcagcatgaatcaggaatcttgggacctttactttatggggaagttggagacacactgttgattatatttaagaatcaagcaagcagaccatataacatctaccctcacggaatcactgatgtccgtcctttgtattcaaggagattaccaaaaggtgtaaaacatttgaaggattttccaattctgccaggagaaatattcaaatataaatggacagtgactgtagaagatgggccaactaaatcagatcctcggtgcctgacccgctattactctagtttcgttaatatggagagagatctagcttcaggactcattggccctctcctcatctgctacaaagaatctgtagatcaaagaggaaaccagataatgtcagacaagaggaatgtcatcctgttttctgtatttgatgagaaccgaagctggtacctcacagagaatatacaacgctttctccccaatccagctggagtgcagcttgaggatccagagttccaagcctccaacatcatgcacagcatcaatggctatgtttttgatagtttgcagttgtcagtttgtttgcatgaggtggcatactggtacattctaagcattggagcacagactgacttcctttctgtcttcttctctggatataccttcaaacacaaaatggtctatgaagacacactcaccctattcccattctcaggagaaactgtcttcatgtcgatggaaaacccaggtctatggattctggggtgccacaactcagactttcggaacagaggcatgaccgccttactgaaggtttctagttgtgacaagaacactggtgattattacgaggacagttatgaagatatttcagcatacttgctgagtaaaaacaatgccattgaaccaagaagcttctctcaaaacggcgcgccaggttctcctgctggctcccccacctcaacagaagaggggacaagcgaaagcgctacgcctgagagtggccctggctctgagccagccacctccggctctgaaacccctgcctcgagcccaccagtcttgaaacgccatcaagctgaaataactcgtactactcttcagtcagatcaagaggaaatcgattatgatgataccatatcagttgaaatgaagaaggaagattttgacatttatgatgaggatgaaaatcagagcccccgcagctttcaaaagaaaacacgacactattttattgctgcagtggagaggctctgggattatgggatgagtagctccccacatgttctaagaaacagggctcagagtggcagtgtccctcagttcaagaaagttgttttccaggaatttactgatggctcctttactcagcccttataccgtggagaactaaatgaacatttgggactcctggggccatatataagagcagaagttgaagataatatcatggtaactttcagaaatcaggcctctcgtccctattccttctattctagccttatttcttatgaggaagatcagaggcaaggagcagaacctagaaaaaactttgtcaagcctaatgaaaccaaaacttacttttggaaagtgcaacatcatatggcacccactaaagatgagtttgactgcaaagcctgggcttatttctctgatgttgacctggaaaaagatgtgcactcaggcctgattggaccccttctggtctgccacactaacacactgaaccctgctcatgggagacaagtgacagtacaggaatttgctctgtttttcaccatctttgatgagaccaaaagctggtacttcactgaaaatatggaaagaaactgcaggggcgcgccaggtacacccggatcgggtacagcgtcatcgagccccggtgcgtcacctggtacgtcgagcacggggtcgccaggggcgtcccctgggacgtcctcaacaggctcgcccggtgcgtcacccggcacgtcgtccacgggttcacctggtagctccccttccgcgtccactggcaccgggcctggaactccggggagcggcacagcgagctcgtcgccgggagcatcgcctgggacatcgagcaccgggtcgccaggagcatcgcccggaacatccagcacaggaagccccggcgcgtcgcccgggacatcaagcacaggttccccgggatcgagcacgccgtccggagccactggatcaccagggagctcgacaccttccggcgcaacgggatcgcccggagccagcccgggtacgtcaagcactggctcccctgcctcgagcgctccctgcaatatccagatggaagatcccacttttaaagagaattatcgcttccatgcaatcaatggctacataatggatacactacctggcttagtaatggctcaggatcaaaggattcgatggtatctgctcagcatgggcagcaatgaaaacatccattctattcatttcagtggacatgtgttcactgtacgaaaaaaagaggagtataaaatggcactgtacaatctctatccaggtgtttttgagacagtggaaatgttaccatccaaagctggaatttggcgggtggaatgccttattggcgagcatctacatgctgggatgagcacactttttctggtgtacagcaataagtgtcagactcccctgggaatggcttctggacacattagagattttcagattacagcttcaggacaatatggacagtgggccccaaagctggccagacttcattattccggatcaatcaatgcctggagcaccaaggagcccttttcttggatcaaggtggatctgttggcaccaatgattattcacggcatcaagacccagggtgcccgtcagaagttctccagcctctacatctctcagtttatcatcatgtatagtcttgatgggaagaagtggcagacttatcgaggaaattccactggaaccttaatggtcttctttggcaatgtggattcatctgggataaaacacaatatttttaaccctccaattattgctcgatacatccgtttgcacccaactcattatagcattcgcagcactcttcgcatggagttgatgggctgtgatttaaatagttgcagcatgccattgggaatggagagtaaagcaatatcagatgcacagattactgcttcatcctactttaccaatatgtttgccacctggtctccttcaaaagctcgacttcacctccaagggaggagtaatgcctggagacctcaggtgaataatccaaaagagtggctgcaagtggacttccagaagacaatgaaagtcacaggagtaactactcagggagtaaaatctctgcttaccagcatgtatgtgaaggagttcctcatctccagcagtcaagatggccatcagtggactctcttttttcagaatggcaaagtaaaggtttttcagggaaatcaagactccttcacacctgtggtgaactctctagacccaccgttactgactcgctaccttcgaattcacccccagagttgggtgcaccagattgccctgaggatggaggttctgggctgcgaggcacaggacctctacggcgcgccaggttctcctgctggctcccccacctcaacagaagaggggacaagcgaaagcgctacgcctgagagtggccctggctctgagccagccacctccggctctgaaacccctgcctcgagcgaacaaaaactcatctcagaagaggatctgtcacctgcaaccggtcatcatcaccatcaccattga

SEQ ID NO: 1425 - protein, 1837 aa, synthetic construct
  REGION 1..1837: note = Description of Artificial Sequence: Synthetic polypeptide
ATRRYYLGAVELSWDYMQSDLGELPVDARFPPRVPKSFPFNTSVVYKKTLFVEFTDHLFNIAKPRPPWMGLLGPTIQAEVYDTVVITLKNMASHPVSLHAVGVSYWKASEGAEYDDQTSQREKEDDKVFPGGSHTYVWQVLKENGPMASDPLCLTYSYLSHVDLVKDLNSGLIGALLVCREGSLAKEKTQTLHKFILLFAVFDEGKSWHSETKNSLMQDRDAASARAWPKMHTVNGYVNRSLPGLIGCHRKSVYWHVIGMGTTPEVHSIFLEGHTFLVRNHRQASLEISPITFLTAQTLLMDLGQFLLFCHISSHQHDGMEAYVKVDSCPEEPQLRMKNNEEAEDYDDDLTDSEMDVVRFDDDNSPSFIQIRSVAKKHPKTWVHYIAAEEEDWDYAPLVLAPDDRSYKSQYLNNGPQRIGRKYKKVRFMAYTDETFKTREAIQHESGILGPLLYGEVGDTLLIIFKNQASRPYNIYPHGITDVRPLYSRRLPKGVKHLKDFPILPGEIFKYKWTVTVEDGPTKSDPRCLTRYYSSFVNMERDLASGLIGPLLICYKESVDQRGNQIMSDKRNVILFSVFDENRSWYLTENIQRFLPNPAGVQLEDPEFQASNIMHSINGYVFDSLQLSVCLHEVAYWYILSIGAQTDFLSVFFSGYTFKHKMVYEDTLTLFPFSGETVFMSMENPGLWILGCHNSDFRNRGMTALLKVSSCDKNTGDYYEDSYEDISAYLLSKNNAIEPRSFSQNGAPGSPAGSPTSTEEGTSESATPESGPGSEPATSGSETPASSPPVLKRHQAEITRTTLQSDQEEIDYDDTISVEMKKEDFDIYDEDENQSPRSFQKKTRHYFIAAVERLWDYGMSSSPHVLRNRAQSGSVPQFKKVVFQEFTDGSFTQPLYRGELNEHLGLLGPYIRAEVEDNIMVTFRNQASRPYSFYSSLISYEEDQRQGAEPRKNFVKPNETKTYFWKVQHHMAPTKDEFDCKAWAYFSDVDLEKDVHSGLIGPLLVCHTNTLNPAHGRQVTVQEFALFFTIFDETKSWYFTENMERNCRGAPGTPGSGTASSSPGSSTPSGATGSPGSSTPSGATGSPGSSTPSGATGSPGSSPSASTGTGPGASPGTSSTGSPGASPGTSSTGSPGTPGSGTASSSPGASPGTSSTGSPGASPGTSSTGSPGASPGTSSTGSPGASPGTSSTGSPGTPGSGTASSSPGSSTPSGATGSPGTPGSGTASSSPGSSTPSGATGSPGTPGSGTASSSPGSSTPSGATGSPGSSTPSGATGSPGSSPSASTGTGPGSSPSASTGTGPGASPGTSSTGSPGTPGSGTASSSPGSSTPSGATGSPASSAPCNIQMEDPTFKENYRFHAINGYIMDTLPGLVMAQDQRIRWYLLSMGSNENIHSIHFSGHVFTVRKKEEYKMALYNLYPGVFETVEMLPSKAGIWRVECLIGEHLHAGMSTLFLVYSNKCQTPLGMASGHIRDFQITASGQYGQWAPKLARLHYSGSINAWSTKEPFSWIKVDLLAPMIIHGIKTQGARQKFSSLYISQFIIMYSLDGKKWQTYRGNSTGTLMVFFGNVDSSGIKHNIFNPPIIARYIRLHPTHYSIRSTLRMELMGCDLNSCSMPLGMESKAISDAQITASSYFTNMFATWSPSKARLHLQGRSNAWRPQVNNPKEWLQVDFQKTMKVTGVTTQGVKSLLTSMYVKEFLISSSQDGHQWTLFFQNGKVKVFQGNQDSFTPVVNSLDPPLLTRYLRIHPQSWVHQIALRMEVLGCEAQDLYGAPGSPAGSPTSTEEGTSESATPESGPGSEPATSGSETPASSEQKLISEEDLSPATGHHHHHH

SEQ ID NO: 1426 - DNA, 5514 bp, synthetic construct
  misc_feature 1..5514: note = Description of Artificial Sequence: Synthetic polynucleotide
  source 1..5514: mol_type = other DNA
gccaccagaagatactacctgggtgcagtggaactgtcatgggactatatgcaaagtgatctcggtgagctgcctgtggacgcaagatttcctcctagagtgccaaaatcttttccattcaacacctcagtcgtgtacaaaaagactctgtttgtagaattcacggatcaccttttcaacatcgctaagccaaggccaccctggatgggtctgctaggtcctaccatccaggctgaggtttatgatacagtggtcattacacttaagaacatggcttcccatcctgtcagtcttcatgctgttggtgtatcctactggaaagcttctgagggagctgaatatgatgatcagaccagtcaaagggagaaagaagatgataaagtcttccctggtggaagccatacatatgtctggcaggtcctgaaagagaatggtccaatggcctctgacccactgtgccttacctactcatatctttctcatgtggacctggtaaaagacttgaattcaggcctcattggagccctactagtatgtagagaagggagtctggccaaggaaaagacacagaccttgcacaaatttatactactttttgctgtatttgatgaagggaaaagttggcactcagaaacaaagaactccttgatgcaggatagggatgctgcatctgctcgggcctggcctaaaatgcacacagtcaatggttatgtaaacaggtctctgccaggtctgattggatgccacaggaaatcagtctattggcatgtgattggaatgggcaccactcctgaagtgcactcaatattcctcgaaggtcacacatttcttgtgaggaaccatcgccaggctagcttggaaatctcgccaataactttccttactgctcaaacactcttgatggaccttggacagtttctactgttttgtcatatctcttcccaccaacatgatggcatggaagcttatgtcaaagtagacagctgtccagaggaaccccaactacgaatgaaaaataatgaagaagcggaagactatgatgatgatcttactgattctgaaatggatgtggtcaggtttgatgatgacaactctccttcctttatccaaattcgctcagttgccaagaagcatcctaaaacttgggtacattacattgctgctgaagaggaggactgggactatgctcccttagtcctcgcccccgatgacagaagttataaaagtcaatatttgaacaatggccctcagcggattggtaggaagtacaaaaaagtccgatttatggcatacacagatgaaacctttaagactcgtgaagctattcagcatgaatcaggaatcttgggacctttactttatggggaagttggagacacactgttgattatatttaagaatcaagcaagcagaccatataacatctaccctcacggaatcactgatgtccgtcctttgtattcaaggagattaccaaaaggtgtaaaacatttgaaggattttccaattctgccaggagaaatattcaaatataaatggacagtgactgtagaagatgggccaactaaatcagatcctcggtgcctgacccgctattactctagtttcgttaatatggagagagatctagcttcaggactcattggccctctcctcatctgctacaaagaatctgtagatcaaagaggaaaccagataatgtcagacaagaggaatgtcatcctgttttctgtatttgatgagaaccgaagctggtacctcacagagaatatacaacgctttctccccaatccagctggagtgcagcttgaggatccagagttccaagcctccaacatcatgcacagcatcaatggctatgtttttgatagtttgcagttgtcagtttgtttgcatgaggtggcatactggtacattctaagcattggagcacagactgacttcctttctgtcttcttctctggatataccttcaaacacaaaatggtctatgaagacacactcaccctattcccattctcaggagaaactgtcttcatgtcgatggaaaacccaggtctatggattctggggtgccacaactcagactttcggaacagaggcatgaccgccttactgaaggtttctagttgtgacaagaacactggtgattattacgaggacagttatgaagatatttcagcatacttgctgagtaaaaacaatgccattgaaccaagaagcttctctcaaaacggcgcgccaggttctcctgctggctcccccacctcaacagaagaggggacaagcgaaagcgctacgcctgagagtggccctggctctgagccagccacctccggctctgaaacccctgcctcgagcccaccagtcttgaaacgccatcaagctgaaataactcgtactactcttcagtcagatcaagaggaaatcgattatgatgataccatatcagttgaaatgaagaaggaagattttgacatttatgatgaggatgaaaatcagagcccccgcagctttcaaaagaaaacacgacactattttattgctgcagtggagaggctctgggattatgggatgagtagctccccacatgttctaagaaacagggctcagagtggcagtgtccctcagttcaagaaagttgttttccaggaatttactgatggctcctttactcagcccttataccgtggagaactaaatgaacatttgggactcctggggccatatataagagcagaagttgaagataatatcatggtaactttcagaaatcaggcctctcgtccctattccttctattctagccttatttcttatgaggaagatcagaggcaaggagcagaacctagaaaaaactttgtcaagcctaatgaaaccaaaacttacttttggaaagtgcaacatcatatggcacccactaaagatgagtttgactgcaaagcctgggcttatttctctgatgttgacctggaaaaagatgtgcactcaggcctgattggaccccttctggtctgccacactaacacactgaaccctgctcatgggagacaagtgacagtacaggaatttgctctgtttttcaccatctttgatgagaccaaaagctggtacttcactgaaaatatggaaagaaactgcaggggcgcgccaggtacgcccgggtcgggaacagcgtcctcaagcccgggtagctcgacgccgtcaggagccacagggtcgccgggatcgtcgactccatcaggcgcaacgggatcgcctggatcaagcactccatccggagcgacgggaagcccagggagctccccgtccgcatcgactgggacgggacctggagcaagccccggtacgtcgtcaacaggttcgcctggtgcctcgcctggcacgtccagcacggggagccccggaacgccgggttccggaaccgcatcctcctcaccaggtgcctcaccgggcacctcatcaacgggatcaccaggggcttcaccgggaacgagctcgacgggttcaccgggagcgtccccggggacttcgtcgacaggtagcccaggggcaagccccggtacatcgtcaacgggttccccagggacaccggggagcggtactgcatcgtcctcacccggttcctcgacacccagcggagccacgggttcgcccggtactccggggtccggaacggccagcagctcacccggttcctcgacgccatcaggtgccacgggctcgcctggaacgccaggctcgggcactgcgagcagcagccctggatcatcaacgcctagcggagcgaccggctcccctggatcgtcaactccctcgggcgcgactgggagcccaggaagctcaccgtcggcctcgacgggaacagggcctggttcgagcccctcagcttcaacaggaacaggtccaggcgcgtcgccaggtacatcatcgacgggttcgcctgggacccctgggtccggtactgcctcatcatcgcccggatcgtccaccccctcgggagcgacaggttcgcctgcctcgagcgctccctgcaatatccagatggaagatcccacttttaaagagaattatcgcttccatgcaatcaatggctacataatggatacactacctggcttagtaatggctcaggatcaaaggattcgatggtatctgctcagcatgggcagcaatgaaaacatccattctattcatttcagtggacatgtgttcactgtacgaaaaaaagaggagtataaaatggcactgtacaatctctatccaggtgtttttgagacagtggaaatgttaccatccaaagctggaatttggcgggtggaatgccttattggcgagcatctacatgctgggatgagcacactttttctggtgtacagcaataagtgtcagactcccctgggaatggcttctggacacattagagattttcagattacagcttcaggacaatatggacagtgggccccaaagctggccagacttcattattccggatcaatcaatgcctggagcaccaaggagcccttttcttggatcaaggtggatctgttggcaccaatgattattcacggcatcaagacccagggtgcccgtcagaagttctccagcctctacatctctcagtttatcatcatgtatagtcttgatgggaagaagtggcagacttatcgaggaaattccactggaaccttaatggtcttctttggcaatgtggattcatctgggataaaacacaatatttttaaccctccaattattgctcgatacatccgtttgcacccaactcattatagcattcgcagcactcttcgcatggagttgatgggctgtgatttaaatagttgcagcatgccattgggaatggagagtaaagcaatatcagatgcacagattactgcttcatcctactttaccaatatgtttgccacctggtctccttcaaaagctcgacttcacctccaagggaggagtaatgcctggagacctcaggtgaataatccaaaagagtggctgcaagtggacttccagaagacaatgaaagtcacaggagtaactactcagggagtaaaatctctgcttaccagcatgtatgtgaaggagttcctcatctccagcagtcaagatggccatcagtggactctcttttttcagaatggcaaagtaaaggtttttcagggaaatcaagactccttcacacctgtggtgaactctctagacccaccgttactgactcgctaccttcgaattcacccccagagttgggtgcaccagattgccctgaggatggaggttctgggctgcgaggcacaggacctctacggcgcgccaggttctcctgctggctcccccacctcaacagaagaggggacaagcgaaagcgctacgcctgagagtggccctggctctgagccagccacctccggctctgaaacccctgcctcgagcgaacaaaaactcatctcagaagaggatctgtcacctgcaaccggtcatcatcaccatcaccattga

SEQ ID NO: 1427 - protein, 1693 aa, synthetic construct
  REGION 1..1693: note = Description of Artificial Sequence: Synthetic polypeptide
ATRRYYLGAVELSWDYMQSDLGELPVDARFPPRVPKSFPFNTSVVYKKTLFVEFTDHLFNIAKPRPPWMGLLGPTIQAEVYDTVVITLKNMASHPVSLHAVGVSYWKASEGAEYDDQTSQREKEDDKVFPGGSHTYVWQVLKENGPMASDPLCLTYSYLSHVDLVKDLNSGLIGALLVCREGSLAKEKTQTLHKFILLFAVFDEGKSWHSETKNSLMQDRDAASARAWPKMHTVNGYVNRSLPGLIGCHRKSVYWHVIGMGTTPEVHSIFLEGHTFLVRNHRQASLEISPITFLTAQTLLMDLGQFLLFCHISSHQHDGMEAYVKVDSCPEEPQLRMKNNEEAEDYDDDLTDSEMDVVRFDDDNSPSFIQIRSVAKKHPKTWVHYIAAEEEDWDYAPLVLAPDDRSYKSQYLNNGPQRIGRKYKKVRFMAYTDETFKTREAIQHESGILGPLLYGEVGDTLLIIFKNQASRPYNIYPHGITDVRPLYSRRLPKGVKHLKDFPILPGEIFKYKWTVTVEDGPTKSDPRCLTRYYSSFVNMERDLASGLIGPLLICYKESVDQRGNQIMSDKRNVILFSVFDENRSWYLTENIQRFLPNPAGVQLEDPEFQASNIMHSINGYVFDSLQLSVCLHEVAYWYILSIGAQTDFLSVFFSGYTFKHKMVYEDTLTLFPFSGETVFMSMENPGLWILGCHNSDFRNRGMTALLKVSSCDKNTGDYYEDSYEDISAYLLSKNNAIEPRSFSQNGAPGTPGSGTASSSPGSSTPSGATGSPGASPGTSSTGSPGTPGSGTASSSPGSSTPSGATGSPGSSPSASTGTGPGSSPSASTGTGPGSSTPSGATGSPGSSTPSGATGSPGASPGTSSTGSPGASPGTSSTGSPGASPGTSSTGSPASSPPVLKRHQAEITRTTLQSDQEEIDYDDTISVEMKKEDFDIYDEDENQSPRSFQKKTRHYFIAAVERLWDYGMSSSPHVLRNRAQSGSVPQFKKVVFQEFTDGSFTQPLYRGELNEHLGLLGPYIRAEVEDNIMVTFRNQASRPYSFYSSLISYEEDQRQGAEPRKNFVKPNETKTYFWKVQHHMAPTKDEFDCKAWAYFSDVDLEKDVHSGLIGPLLVCHTNTLNPAHGRQVTVQEFALFFTIFDETKSWYFTENMERNCRGAPGSPAGSPTSTEEGTSESATPESGPGSEPATSGSETPASSAPCNIQMEDPTFKENYRFHAINGYIMDTLPGLVMAQDQRIRWYLLSMGSNENIHSIHFSGHVFTVRKKEEYKMALYNLYPGVFETVEMLPSKAGIWRVECLIGEHLHAGMSTLFLVYSNKCQTPLGMASGHIRDFQITASGQYGQWAPKLARLHYSGSINAWSTKEPFSWIKVDLLAPMIIHGIKTQGARQKFSSLYISQFIIMYSLDGKKWQTYRGNSTGTLMVFFGNVDSSGIKHNIFNPPIIARYIRLHPTHYSIRSTLRMELMGCDLNSCSMPLGMESKAISDAQITASSYFTNMFATWSPSKARLHLQGRSNAWRPQVNNPKEWLQVDFQKTMKVTGVTTQGVKSLLTSMYVKEFLISSSQDGHQWTLFFQNGKVKVFQGNQDSFTPVVNSLDPPLLTRYLRIHPQSWVHQIALRMEVLGCEAQDLYGAPGSPAGSPTSTEEGTSESATPESGPGSEPATSGSETPASSEQKLISEEDLSPATGHHHHHH

SEQ ID NO: 1428 - DNA, 5082 bp, synthetic construct
  misc_feature 1..5082: note = Description of Artificial Sequence: Synthetic polynucleotide
  source 1..5082: mol_type = other DNA
gccaccagaagatactacctgggtgcagtggaactgtcatgggactatatgcaaagtgatctcggtgagctgcctgtggacgcaagatttcctcctagagtgccaaaatcttttccattcaacacctcagtcgtgtacaaaaagactctgtttgtagaattcacggatcaccttttcaacatcgctaagccaaggccaccctggatgggtctgctaggtcctaccatccaggctgaggtttatgatacagtggtcattacacttaagaacatggcttcccatcctgtcagtcttcatgctgttggtgtatcctactggaaagcttctgagggagctgaatatgatgatcagaccagtcaaagggagaaagaagatgataaagtcttccctggtggaagccatacatatgtctggcaggtcctgaaagagaatggtccaatggcctctgacccactgtgccttacctactcatatctttctcatgtggacctggtaaaagacttgaattcaggcctcattggagccctactagtatgtagagaagggagtctggccaaggaaaagacacagaccttgcacaaatttatactactttttgctgtatttgatgaagggaaaagttggcactcagaaacaaagaactccttgatgcaggatagggatgctgcatctgctcgggcctggcctaaaatgcacacagtcaatggttatgtaaacaggtctctgccaggtctgattggatgccacaggaaatcagtctattggcatgtgattggaatgggcaccactcctgaagtgcactcaatattcctcgaaggtcacacatttcttgtgaggaaccatcgccaggctagcttggaaatctcgccaataactttccttactgctcaaacactcttgatggaccttggacagtttctactgttttgtcatatctcttcccaccaacatgatggcatggaagcttatgtcaaagtagacagctgtccagaggaaccccaactacgaatgaaaaataatgaagaagcggaagactatgatgatgatcttactgattctgaaatggatgtggtcaggtttgatgatgacaactctccttcctttatccaaattcgctcagttgccaagaagcatcctaaaacttgggtacattacattgctgctgaagaggaggactgggactatgctcccttagtcctcgcccccgatgacagaagttataaaagtcaatatttgaacaatggccctcagcggattggtaggaagtacaaaaaagtccgatttatggcatacacagatgaaacctttaagactcgtgaagctattcagcatgaatcaggaatcttgggacctttactttatggggaagttggagacacactgttgattatatttaagaatcaagcaagcagaccatataacatctaccctcacggaatcactgatgtccgtcctttgtattcaaggagattaccaaaaggtgtaaaacatttgaaggattttccaattctgccaggagaaatattcaaatataaatggacagtgactgtagaagatgggccaactaaatcagatcctcggtgcctgacccgctattactctagtttcgttaatatggagagagatctagcttcaggactcattggccctctcctcatctgctacaaagaatctgtagatcaaagaggaaaccagataatgtcagacaagaggaatgtcatcctgttttctgtatttgatgagaaccgaagctggtacctcacagagaatatacaacgctttctccccaatccagctggagtgcagcttgaggatccagagttccaagcctccaacatcatgcacagcatcaatggctatgtttttgatagtttgcagttgtcagtttgtttgcatgaggtggcatactggtacattctaagcattggagcacagactgacttcctttctgtcttcttctctggatataccttcaaacacaaaatggtctatgaagacacactcaccctattcccattctcaggagaaactgtcttcatgtcgatggaaaacccaggtctatggattctggggtgccacaactcagactttcggaacagaggcatgaccgccttactgaaggtttctagttgtgacaagaacactggtgattattacgaggacagttatgaagatatttcagcatacttgctgagtaaaaacaatgccattgaaccaagaagcttctctcaaaacggcgcgccaggtacaccgggcagcggcacggcttcgtcgtcacccggctcgtccacaccgtcgggagctacgggaagcccaggagcgtcaccgggaacgtcgtcaacggggtcaccgggtacgccaggtagcggcacggccagcagctcgccaggttcatcgaccccgtcgggagcgactgggtcgcccggatcaagcccgtcagcttccactggaacaggacccgggtcgtcgccgtcagcctcaacggggacaggacctggttcatcgacgccgtcaggggcgacaggctcgcccggatcgtcaacaccctcgggggcaacggggagccctggtgcgtcgcctggaacctcatccaccggaagcccgggggcctcgccgggtacgagctccacgggatcgcccggagcgtcccccggaacttcaagcacagggagccctgcctcgagcccaccagtcttgaaacgccatcaagctgaaataactcgtactactcttcagtcagatcaagaggaaatcgattatgatgataccatatcagttgaaatgaagaaggaagattttgacatttatgatgaggatgaaaatcagagcccccgcagctttcaaaagaaaacacgacactattttattgctgcagtggagaggctctgggattatgggatgagtagctccccacatgttctaagaaacagggctcagagtggcagtgtccctcagttcaagaaagttgttttccaggaatttactgatggctcctttactcagcccttataccgtggagaactaaatgaacatttgggactcctggggccatatataagagcagaagttgaagataatatcatggtaactttcagaaatcaggcctctcgtccctattccttctattctagccttatttcttatgaggaagatcagaggcaaggagcagaacctagaaaaaactttgtcaagcctaatgaaaccaaaacttacttttggaaagtgcaacatcatatggcacccactaaagatgagtttgactgcaaagcctgggcttatttctctgatgttgacctggaaaaagatgtgcactcaggcctgattggaccccttctggtctgccacactaacacactgaaccctgctcatgggagacaagtgacagtacaggaatttgctctgtttttcaccatctttgatgagaccaaaagctggtacttcactgaaaatatggaaagaaactgcaggggcgcgccaggttctcctgctggctcccccacctcaacagaagaggggacaagcgaaagcgctacgcctgagagtggccctggctctgagccagccacctccggctctgaaacccctgcctcgagcgctccctgcaatatccagatggaagatcccacttttaaagagaattatcgcttccatgcaatcaatggctacataatggatacactacctggcttagtaatggctcaggatcaaaggattcgatggtatctgctcagcatgggcagcaatgaaaacatccattctattcatttcagtggacatgtgttcactgtacgaaaaaaagaggagtataaaatggcactgtacaatctctatccaggtgtttttgagacagtggaaatgttaccatccaaagctggaatttggcgggtggaatgccttattggcgagcatctacatgctgggatgagcacactttttctggtgtacagcaataagtgtcagactcccctgggaatggcttctggacacattagagattttcagattacagcttcaggacaatatggacagtgggccccaaagctggccagacttcattattccggatcaatcaatgcctggagcaccaaggagcccttttcttggatcaaggtggatctgttggcaccaatgattattcacggcatcaagacccagggtgcccgtcagaagttctccagcctctacatctctcagtttatcatcatgtatagtcttgatgggaagaagtggcagacttatcgaggaaattccactggaaccttaatggtcttctttggcaatgtggattcatctgggataaaacacaatatttttaaccctccaattattgctcgatacatccgtttgcacccaactcattatagcattcgcagcactcttcgcatggagttgatgggctgtgatttaaatagttgcagcatgccattgggaatggagagtaaagcaatatcagatgcacagattactgcttcatcctactttaccaatatgtttgccacctggtctccttcaaaagctcgacttcacctccaagggaggagtaatgcctggagacctcaggtgaataatccaaaagagtggctgcaagtggacttccagaagacaatgaaagtcacaggagtaactactcagggagtaaaatctctgcttaccagcatgtatgtgaaggagttcctcatctccagcagtcaagatggccatcagtggactctcttttttcagaatggcaaagtaaaggtttttcagggaaatcaagactccttcacacctgtggtgaactctctagacccaccgttactgactcgctaccttcgaattcacccccagagttgggtgcaccagattgccctgaggatggaggttctgggctgcgaggcacaggacctctacggcgcgccaggttctcctgctggctcccccacctcaacagaagaggggacaagcgaaagcgctacgcctgagagtggccctggctctgagccagccacctccggctctgaaacccctgcctcgagcgaacaaaaactcatctcagaagaggatctgtcacctgcaaccggtcatcatcaccatcaccattga

SEQ ID NO: 1429 - protein, 1801 aa, synthetic construct
  REGION 1..1801: note = Description of Artificial Sequence: Synthetic polypeptide
ATRRYYLGAVELSWDYMQSDLGELPVDARFPPRVPKSFPFNTSVVYKKTLFVEFTDHLFNIAKPRPPWMGLLGPTIQAEVYDTVVITLKNMASHPVSLHAVGVSYWKASEGAEYDDQTSQREKEDDKVFPGGSHTYVWQVLKENGPMASDPLCLTYSYLSHVDLVKDLNSGLIGALLVCREGSLAKEKTQTLHKFILLFAVFDEGKSWHSETKNSLMQDRDAASARAWPKMHTVNGYVNRSLPGLIGCHRKSVYWHVIGMGTTPEVHSIFLEGHTFLVRNHRQASLEISPITFLTAQTLLMDLGQFLLFCHISSHQHDGMEAYVKVDSCPEEPQLRMKNNEEAEDYDDDLTDSEMDVVRFDDDNSPSFIQIRSVAKKHPKTWVHYIAAEEEDWDYAPLVLAPDDRSYKSQYLNNGPQRIGRKYKKVRFMAYTDETFKTREAIQHESGILGPLLYGEVGDTLLIIFKNQASRPYNIYPHGITDVRPLYSRRLPKGVKHLKDFPILPGEIFKYKWTVTVEDGPTKSDPRCLTRYYSSFVNMERDLASGLIGPLLICYKESVDQRGNQIMSDKRNVILFSVFDENRSWYLTENIQRFLPNPAGVQLEDPEFQASNIMHSINGYVFDSLQLSVCLHEVAYWYILSIGAQTDFLSVFFSGYTFKHKMVYEDTLTLFPFSGETVFMSMENPGLWILGCHNSDFRNRGMTALLKVSSCDKNTGDYYEDSYEDISAYLLSKNNAIEPRSFSQNGAPGTPGSGTASSSPGSSTPSGATGSPGASPGTSSTGSPGTPGSGTASSSPGSSTPSGATGSPGSSPSASTGTGPGSSPSASTGTGPGSSTPSGATGSPGSSTPSGATGSPGASPGTSSTGSPGASPGTSSTGSPGASPGTSSTGSPASSPPVLKRHQAEITRTTLQSDQEEIDYDDTISVEMKKEDFDIYDEDENQSPRSFQKKTRHYFIAAVERLWDYGMSSSPHVLRNRAQSGSVPQFKKVVFQEFTDGSFTQPLYRGELNEHLGLLGPYIRAEVEDNIMVTFRNQASRPYSFYSSLISYEEDQRQGAEPRKNFVKPNETKTYFWKVQHHMAPTKDEFDCKAWAYFSDVDLEKDVHSGLIGPLLVCHTNTLNPAHGRQVTVQEFALFFTIFDETKSWYFTENMERNCRGAPGTPGSGTASSSPGASPGTSSTGSPGASPGTSSTGSPGASPGTSSTGSPGSSPSASTGTGPGTPGSGTASSSPGASPGTSSTGSPGASPGTSSTGSPGASPGTSSTGSPGSSTPSGATGSPGSSTPSGATGSPGASPGTSSTGSPASSAPCNIQMEDPTFKENYRFHAINGYIMDTLPGLVMAQDQRIRWYLLSMGSNENIHSIHFSGHVFTVRKKEEYKMALYNLYPGVFETVEMLPSKAGIWRVECLIGEHLHAGMSTLFLVYSNKCQTPLGMASGHIRDFQITASGQYGQWAPKLARLHYSGSINAWSTKEPFSWIKVDLLAPMIIHGIKTQGARQKFSSLYISQFIIMYSLDGKKWQTYRGNSTGTLMVFFGNVDSSGIKHNIFNPPIIARYIRLHPTHYSIRSTLRMELMGCDLNSCSMPLGMESKAISDAQITASSYFTNMFATWSPSKARLHLQGRSNAWRPQVNNPKEWLQVDFQKTMKVTGVTTQGVKSLLTSMYVKEFLISSSQDGHQWTLFFQNGKVKVFQGNQDSFTPVVNSLDPPLLTRYLRIHPQSWVHQIALRMEVLGCEAQDLYGAPGSPAGSPTSTEEGTSESATPESGPGSEPATSGSETPASSEQKLISEEDLSPATGHHHHHH

SEQ ID NO: 1430 - DNA, 5406 bp, synthetic construct
  misc_feature 1..5406: note = Description of Artificial Sequence: Synthetic polynucleotide
  source 1..5406: mol_type = other DNA
gccaccagaagatactacctgggtgcagtggaactgtcatgggactatatgcaaagtgatctcggtgagctgcctgtggacgcaagatttcctcctagagtgccaaaatcttttccattcaacacctcagtcgtgtacaaaaagactctgtttgtagaattcacggatcaccttttcaacatcgctaagccaaggccaccctggatgggtctgctaggtcctaccatccaggctgaggtttatgatacagtggtcattacacttaagaacatggcttcccatcctgtcagtcttcatgctgttggtgtatcctactggaaagcttctgagggagctgaatatgatgatcagaccagtcaaagggagaaagaagatgataaagtcttccctggtggaagccatacatatgtctggcaggtcctgaaagagaatggtccaatggcctctgacccactgtgccttacctactcatatctttctcatgtggacctggtaaaagacttgaattcaggcctcattggagccctactagtatgtagagaagggagtctggccaaggaaaagacacagaccttgcacaaatttatactactttttgctgtatttgatgaagggaaaagttggcactcagaaacaaagaactccttgatgcaggatagggatgctgcatctgctcgggcctggcctaaaatgcacacagtcaatggttatgtaaacaggtctctgccaggtctgattggatgccacaggaaatcagtctattggcatgtgattggaatgggcaccactcctgaagtgcactcaatattcctcgaaggtcacacatttcttgtgaggaaccatcgccaggctagcttggaaatctcgccaataactttccttactgctcaaacactcttgatggaccttggacagtttctactgttttgtcatatctcttcccaccaacatgatggcatggaagcttatgtcaaagtagacagctgtccagaggaaccccaactacgaatgaaaaataatgaagaagcggaagactatgatgatgatcttactgattctgaaatggatgtggtcaggtttgatgatgacaactctccttcctttatccaaattcgctcagttgccaagaagcatcctaaaacttgggtacattacattgctgctgaagaggaggactgggactatgctcccttagtcctcgcccccgatgacagaagttataaaagtcaatatttgaacaatggccctcagcggattggtaggaagtacaaaaaagtccgatttatggcatacacagatgaaacctttaagactcgtgaagctattcagcatgaatcaggaatcttgggacctttactttatggggaagttggagacacactgttgattatatttaagaatcaagcaagcagaccatataacatctaccctcacggaatcactgatgtccgtcctttgtattcaaggagattaccaaaaggtgtaaaacatttgaaggattttccaattctgccaggagaaatattcaaatataaatggacagtgactgtagaagatgggccaactaaatcagatcctcggtgcctgacccgctattactctagtttcgttaatatggagagagatctagcttcaggactcattggccctctcctcatctgctacaaagaatctgtagatcaaagaggaaaccagataatgtcagacaagaggaatgtcatcctgttttctgtatttgatgagaaccgaagctggtacctcacagagaatatacaacgctttctccccaatccagctggagtgcagcttgaggatccagagttccaagcctccaacatcatgcacagcatcaatggctatgtttttgatagtttgcagttgtcagtttgtttgcatgaggtggcatactggtacattctaagcattggagcacagactgacttcctttctgtcttcttctctggatataccttcaaacacaaaatggtctatgaagacacactcaccctattcccattctcaggagaaactgtcttcatgtcgatggaaaacccaggtctatggattctggggtgccacaactcagactttcggaacagaggcatgaccgccttactgaaggtttctagttgtgacaagaacactggtgattattacgaggacagttatgaagatatttcagcatacttgctgagtaaaaacaatgccattgaaccaagaagcttctctcaaaacggcgcgccaggtacaccgggcagcggcacggcttcgtcgtcacccggctcgtccacaccgtcgggagctacgggaagcccaggagcgtcaccgggaacgtcgtcaacggggtcaccgggtacgccaggtagcggcacggccagcagctcgccaggttcatcgaccccgtcgggagcgactgggtcgcccggatcaagcccgtcagcttccactggaacaggacccgggtcgtcgccgtcagcctcaacggggacaggacctggttcatcgacgccgtcaggggcgacaggctcgcccggatcgtcaacaccctcgggggcaacggggagccctggtgcgtcgcctggaacctcatccaccggaagcccgggggcctcgccgggtacgagctccacgggatcgcccggagcgtcccccggaacttcaagcacagggagccctgcctcgagcccaccagtcttgaaacgccatcaagctgaaataactcgtactactcttcagtcagatcaagaggaaatcgattatgatgataccatatcagttgaaatgaagaaggaagattttgacatttatgatgaggatgaaaatcagagcccccgcagctttcaaaagaaaacacgacactattttattgctgcagtggagaggctctgggattatgggatgagtagctccccacatgttctaagaaacagggctcagagtggcagtgtccctcagttcaagaaagttgttttccaggaatttactgatggctcctttactcagcccttataccgtggagaactaaatgaacatttgggactcctggggccatatataagagcagaagttgaagataatatcatggtaactttcagaaatcaggcctctcgtccctattccttctattctagccttatttcttatgaggaagatcagaggcaaggagcagaacctagaaaaaactttgtcaagcctaatgaaaccaaaacttacttttggaaagtgcaacatcatatggcacccactaaagatgagtttgactgcaaagcctgggcttatttctctgatgttgacctggaaaaagatgtgcactcaggcctgattggaccccttctggtctgccacactaacacactgaaccctgctcatgggagacaagtgacagtacaggaatttgctctgtttttcaccatctttgatgagaccaaaagctggtacttcactgaaaatatggaaagaaactgcaggggcgcgccaggtacacccggatcgggtacagcgtcatcgagccccggtgcgtcacctggtacgtcgagcacggggtcgccaggggcgtcccctgggacgtcctcaacaggctcgcccggtgcgtcacccggcacgtcgtccacgggttcacctggtagctccccttccgcgtccactggcaccgggcctggaactccggggagcggcacagcgagctcgtcgccgggagcatcgcctgggacatcgagcaccgggtcgccaggagcatcgcccggaacatccagcacaggaagccccggcgcgtcgcccgggacatcaagcacaggttccccgggatcgagcacgccgtccggagccactggatcaccagggagctcgacaccttccggcgcaacgggatcgcccggagccagcccgggtacgtcaagcactggctcccctgcctcgagcgctccctgcaatatccagatggaagatcccacttttaaagagaattatcgcttccatgcaatcaatggctacataatggatacactacctggcttagtaatggctcaggatcaaaggattcgatggtatctgctcagcatgggcagcaatgaaaacatccattctattcatttcagtggacatgtgttcactgtacgaaaaaaagaggagtataaaatggcactgtacaatctctatccaggtgtttttgagacagtggaaatgttaccatccaaagctggaatttggcgggtggaatgccttattggcgagcatctacatgctgggatgagcacactttttctggtgtacagcaataagtgtcagactcccctgggaatggcttctggacacattagagattttcagattacagcttcaggacaatatggacagtgggccccaaagctggccagacttcattattccggatcaatcaatgcctggagcaccaaggagcccttttcttggatcaaggtggatctgttggcaccaatgattattcacggcatcaagacccagggtgcccgtcagaagttctccagcctctacatctctcagtttatcatcatgtatagtcttgatgggaagaagtggcagacttatcgaggaaattccactggaaccttaatggtcttctttggcaatgtggattcatctgggataaaacacaatatttttaaccctccaattattgctcgatacatccgtttgcacccaactcattatagcattcgcagcactcttcgcatggagttgatgggctgtgatttaaatagttgcagcatgccattgggaatggagagtaaagcaatatcagatgcacagattactgcttcatcctactttaccaatatgtttgccacctggtctccttcaaaagctcgacttcacctccaagggaggagtaatgcctggagacctcaggtgaataatccaaaagagtggctgcaagtggacttccagaagacaatgaaagtcacaggagtaactactcagggagtaaaatctctgcttaccagcatgtatgtgaaggagttcctcatctccagcagtcaagatggccatcagtggactctcttttttcagaatggcaaagtaaaggtttttcagggaaatcaagactccttcacacctgtggtgaactctctagacccaccgttactgactcgctaccttcgaattcacccccagagttgggtgcaccagattgccctgaggatggaggttctgggctgcgaggcacaggacctctacggcgcgccaggttctcctgctggctcccccacctcaacagaagaggggacaagcgaaagcgctacgcctgagagtggccctggctctgagccagccacctccggctctgaaacccctgcctcgagcgaacaaaaactcatctcagaagaggatctgtcacctgcaaccggtcatcatcaccatcaccattga

SEQ ID NO: 1431 - protein, 1945 aa, synthetic construct
  REGION 1..1945: note = Description of Artificial Sequence: Synthetic polypeptide
ATRRYYLGAVELSWDYMQSDLGELPVDARFPPRVPKSFPFNTSVVYKKTLFVEFTDHLFNIAKPRPPWMGLLGPTIQAEVYDTVVITLKNMASHPVSLHAVGVSYWKASEGAEYDDQTSQREKEDDKVFPGGSHTYVWQVLKENGPMASDPLCLTYSYLSHVDLVKDLNSGLIGALLVCREGSLAKEKTQTLHKFILLFAVFDEGKSWHSETKNSLMQDRDAASARAWPKMHTVNGYVNRSLPGLIGCHRKSVYWHVIGMGTTPEVHSIFLEGHTFLVRNHRQASLEISPITFLTAQTLLMDLGQFLLFCHISSHQHDGMEAYVKVDSCPEEPQLRMKNNEEAEDYDDDLTDSEMDVVRFDDDNSPSFIQIRSVAKKHPKTWVHYIAAEEEDWDYAPLVLAPDDRSYKSQYLNNGPQRIGRKYKKVRFMAYTDETFKTREAIQHESGILGPLLYGEVGDTLLIIFKNQASRPYNIYPHGITDVRPLYSRRLPKGVKHLKDFPILPGEIFKYKWTVTVEDGPTKSDPRCLTRYYSSFVNMERDLASGLIGPLLICYKESVDQRGNQIMSDKRNVILFSVFDENRSWYLTENIQRFLPNPAGVQLEDPEFQASNIMHSINGYVFDSLQLSVCLHEVAYWYILSIGAQTDFLSVFFSGYTFKHKMVYEDTLTLFPFSGETVFMSMENPGLWILGCHNSDFRNRGMTALLKVSSCDKNTGDYYEDSYEDISAYLLSKNNAIEPRSFSQNGAPGTPGSGTASSSPGSSTPSGATGSPGASPGTSSTGSPGTPGSGTASSSPGSSTPSGATGSPGSSPSASTGTGPGSSPSASTGTGPGSSTPSGATGSPGSSTPSGATGSPGASPGTSSTGSPGASPGTSSTGSPGASPGTSSTGSPASSPPVLKRHQAEITRTTLQSDQEEIDYDDTISVEMKKEDFDIYDEDENQSPRSFQKKTRHYFIAAVERLWDYGMSSSPHVLRNRAQSGSVPQFKKVVFQEFTDGSFTQPLYRGELNEHLGLLGPYIRAEVEDNIMVTFRNQASRPYSFYSSLISYEEDQRQGAEPRKNFVKPNETKTYFWKVQHHMAPTKDEFDCKAWAYFSDVDLEKDVHSGLIGPLLVCHTNTLNPAHGRQVTVQEFALFFTIFDETKSWYFTENMERNCRGAPGTPGSGTASSSPGSSTPSGATGSPGSSTPSGATGSPGSSTPSGATGSPGSSPSASTGTGPGASPGTSSTGSPGASPGTSSTGSPGTPGSGTASSSPGASPGTSSTGSPGASPGTSSTGSPGASPGTSSTGSPGASPGTSSTGSPGTPGSGTASSSPGSSTPSGATGSPGTPGSGTASSSPGSSTPSGATGSPGTPGSGTASSSPGSSTPSGATGSPGSSTPSGATGSPGSSPSASTGTGPGSSPSASTGTGPGASPGTSSTGSPGTPGSGTASSSPGSSTPSGATGSPASSAPCNIQMEDPTFKENYRFHAINGYIMDTLPGLVMAQDQRIRWYLLSMGSNENIHSIHFSGHVFTVRKKEEYKMALYNLYPGVFETVEMLPSKAGIWRVECLIGEHLHAGMSTLFLVYSNKCQTPLGMASGHIRDFQITASGQYGQWAPKLARLHYSGSINAWSTKEPFSWIKVDLLAPMIIHGIKTQGARQKFSSLYISQFIIMYSLDGKKWQTYRGNSTGTLMVFFGNVDSSGIKHNIFNPPIIARYIRLHPTHYSIRSTLRMELMGCDLNSCSMPLGMESKAISDAQITASSYFTNMFATWSPSKARLHLQGRSNAWRPQVNNPKEWLQVDFQKTMKVTGVTTQGVKSLLTSMYVKEFLISSSQDGHQWTLFFQNGKVKVFQGNQDSFTPVVNSLDPPLLTRYLRIHPQSWVHQIALRMEVLGCEAQDLYGAPGSPAGSPTSTEEGTSESATPESGPGSEPATSGSETPASSEQKLISEEDLSPATGHHHHHH

SEQ ID NO: 1432 - DNA, 5838 bp, synthetic construct
  misc_feature 1..5838: note = Description of Artificial Sequence: Synthetic polynucleotide
  source 1..5838: mol_type = other DNA
gccaccagaagatactacctgggtgcagtggaactgtcatgggactatatgcaaagtgatctcggtgagctgcctgtggacgcaagatttcctcctagagtgccaaaatcttttccattcaacacctcagtcgtgtacaaaaagactctgtttgtagaattcacggatcaccttttcaacatcgctaagccaaggccaccctggatgggtctgctaggtcctaccatccaggctgaggtttatgatacagtggtcattacacttaagaacatggcttcccatcctgtcagtcttcatgctgttggtgtatcctactggaaagcttctgagggagctgaatatgatgatcagaccagtcaaagggagaaagaagatgataaagtcttccctggtggaagccatacatatgtctggcaggtcctgaaagagaatggtccaatggcctctgacccactgtgccttacctactcatatctttctcatgtggacctggtaaaagacttgaattcaggcctcattggagccctactagtatgtagagaagggagtctggccaaggaaaagacacagaccttgcacaaatttatactactttttgctgtatttgatgaagggaaaagttggcactcagaaacaaagaactccttgatgcaggatagggatgctgcatctgctcgggcctggcctaaaatgcacacagtcaatggttatgtaaacaggtctctgccaggtctgattggatgccacaggaaatcagtctattggcatgtgattggaatgggcaccactcctgaagtgcactcaatattcctcgaaggtcacacatttcttgtgaggaaccatcgccaggctagcttggaaatctcgccaataactttccttactgctcaaacactcttgatggaccttggacagtttctactgttttgtcatatctcttcccaccaacatgatggcatggaagcttatgtcaaagtagacagctgtccagaggaaccccaactacgaatgaaaaataatgaagaagcggaagactatgatgatgatcttactgattctgaaatggatgtggtcaggtttgatgatgacaactctccttcctttatccaaattcgctcagttgccaagaagcatcctaaaacttgggtacattacattgctgctgaagaggaggactgggactatgctcccttagtcctcgcccccgatgacagaagttataaaagtcaatatttgaacaatggccctcagcggattggtaggaagtacaaaaaagtccgatttatggcatacacagatgaaacctttaagactcgtgaagctattcagcatgaatcaggaatcttgggacctttactttatggggaagttggagacacactgttgattatatttaagaatcaagcaagcagaccatataacatctaccctcacggaatcactgatgtccgtcctttgtattcaaggagattaccaaaaggtgtaaaacatttgaaggattttccaattctgccaggagaaatattcaaatataaatggacagtgactgtagaagatgggccaactaaatcagatcctcggtgcctgacccgctattactctagtttcgttaatatggagagagatctagcttcaggactcattggccctctcctcatctgctacaaagaatctgtagatcaaagaggaaaccagataatgtcagacaagaggaatgtcatcctgttttctgtatttgatgagaaccgaagctggtacctcacagagaatatacaacgctttctccccaatccagctggagtgcagcttgaggatccagagttccaagcctccaacatcatgcacagcatcaatggctatgtttttgatagtttgcagttgtcagtttgtttgcatgaggtggcatactggtacattctaagcattggagcacagactgacttcctttctgtcttcttctctggatataccttcaaacacaaaatggtctatgaagacacactcaccctattcccattctcaggagaaactgtcttcatgtcgatggaaaacccaggtctatggattctggggtgccacaactcagactttcggaacagaggcatgaccgccttactgaaggtttctagttgtgacaagaacactggtgattattacgaggacagttatgaagatatttcagcatacttgctgagtaaaaacaatgccattgaaccaagaagcttctctcaaaacggcgcgccaggtacaccgggcagcggcacggcttcgtcgtcacccggctcgtccacaccgtcgggagctacgggaagcccaggagcgtcaccgggaacgtcgtcaacggggtcaccgggtacgccaggtagcggcacggccagcagctcgccaggttcatcgaccccgtcgggagcgactgggtcgcccggatcaagcccgtcagcttccactggaacaggacccgggtcgtcgccgtcagcctcaacggggacaggacctggttcatcgacgccgtcaggggcgacaggctcgcccggatcgtcaacaccctcgggggcaacggggagccctggtgcgtcgcctggaacctcatccaccggaagcccgggggcctcgccgggtacgagctccacgggatcgcccggagcgtcccccggaacttcaagcacagggagccctgcctcgagcccaccagtcttgaaacgccatcaagctgaaataactcgtactactcttcagtcagatcaagaggaaatcgattatgatgataccatatcagttgaaatgaagaaggaagattttgacatttatgatgaggatgaaaatcagagcccccgcagctttcaaaagaaaacacgacactattttattgctgcagtggagaggctctgggattatgggatgagtagctccccacatgttctaagaaacagggctcagagtggcagtgtccctcagttcaagaaagttgttttccaggaatttactgatggctcctttactcagcccttataccgtggagaactaaatgaacatttgggactcctggggccatatataagagcagaagttgaagataatatcatggtaactttcagaaatcaggcctctcgtccctattccttctattctagccttatttcttatgaggaagatcagaggcaaggagcagaacctagaaaaaactttgtcaagcctaatgaaaccaaaacttacttttggaaagtgcaacatcatatggcacccactaaagatgagtttgactgcaaagcctgggcttatttctctgatgttgacctggaaaaagatgtgcactcaggcctgattggaccccttctggtctgccacactaacacactgaaccctgctcatgggagacaagtgacagtacaggaatttgctctgtttttcaccatctttgatgagaccaaaagctggtacttcactgaaaatatggaaagaaactgcaggggcgcgccaggtacgcccgggtcgggaacagcgtcctcaagcccgggtagctcgacgccgtcaggagccacagggtcgccgggatcgtcgactccatcaggcgcaacgggatcgcctggatcaagcactccatccggagcgacgggaagcccagggagctccccgtccgcatcgactgggacgggacctggagcaagccccggtacgtcgtcaacaggttcgcctggtgcctcgcctggcacgtccagcacggggagccccggaacgccgggttccggaaccgcatcctcctcaccaggtgcctcaccgggcacctcatcaacgggatcaccaggggcttcaccgggaacgagctcgacgggttcaccgggagcgtccccggggacttcgtcgacaggtagcccaggggcaagccccggtacatcgtcaacgggttccccagggacaccggggagcggtactgcatcgtcctcacccggttcctcgacacccagcggagccacgggttcgcccggtactccggggtccggaacggccagcagctcacccggttcctcgacgccatcaggtgccacgggctcgcctggaacgccaggctcgggcactgcgagcagcagccctggatcatcaacgcctagcggagcgaccggctcccctggatcgtcaactccctcgggcgcgactgggagcccaggaagctcaccgtcggcctcgacgggaacagggcctggttcgagcccctcagcttcaacaggaacaggtccaggcgcgtcgccaggtacatcatcgacgggttcgcctgggacccctgggtccggtactgcctcatcatcgcccggatcgtccaccccctcgggagcgacaggttcgcctgcctcgagcgctccctgcaatatccagatggaagatcccacttttaaagagaattatcgcttccatgcaatcaatggctacataatggatacactacctggcttagtaatggctcaggatcaaaggattcgatggtatctgctcagcatgggcagcaatgaaaacatccattctattcatttcagtggacatgtgttcactgtacgaaaaaaagaggagtataaaatggcactgtacaatctctatccaggtgtttttgagacagtggaaatgttaccatccaaagctggaatttggcgggtggaatgccttattggcgagcatctacatgctgggatgagcacactttttctggtgtacagcaataagtgtcagactcccctgggaatggcttctggacacattagagattttcagattacagcttcaggacaatatggacagtgggccccaaagctggccagacttcattattccggatcaatcaatgcctggagcaccaaggagcccttttcttggatcaaggtggatctgttggcaccaatgattattcacggcatcaagacccagggtgcccgtcagaagttctccagcctctacatctctcagtttatcatcatgtatagtcttgatgggaagaagtggcagacttatcgaggaaattccactggaaccttaatggtcttctttggcaatgtggattcatctgggataaaacacaatatttttaaccctccaattattgctcgatacatccgtttgcacccaactcattatagcattcgcagcactcttcgcatggagttgatgggctgtgatttaaatagttgcagcatgccattgggaatggagagtaaagcaatatcagatgcacagattactgcttcatcctactttaccaatatgtttgccacctggtctccttcaaaagctcgacttcacctccaagggaggagtaatgcctggagacctcaggtgaataatccaaaagagtggctgcaagtggacttccagaagacaatgaaagtcacaggagtaactactcagggagtaaaatctctgcttaccagcatgtatgtgaaggagttcctcatctccagcagtcaagatggccatcagtggactctcttttttcagaatggcaaagtaaaggtttttcagggaaatcaagactccttcacacctgtggtgaactctctagacccaccgttactgactcgctaccttcgaattcacccccagagttgggtgcaccagattgccctgaggatggaggttctgggctgcgaggcacaggacctctacggcgcgccaggttctcctgctggctcccccacctcaacagaagaggggacaagcgaaagcgctacgcctgagagtggccctggctctgagccagccacctccggctctgaaacccctgcctcgagcgaacaaaaactcatctcagaagaggatctgtcacctgcaaccggtcatcatcaccatcaccattga

SEQ ID NO: 1433 - protein, 1837 aa, synthetic construct
  REGION 1..1837: note = Description of Artificial Sequence: Synthetic polypeptide
ATRRYYLGAVELSWDYMQSDLGELPVDARFPPRVPKSFPFNTSVVYKKTLFVEFTDHLFNIAKPRPPWMGLLGPTIQAEVYDTVVITLKNMASHPVSLHAVGVSYWKASEGAEYDDQTSQREKEDDKVFPGGSHTYVWQVLKENGPMASDPLCLTYSYLSHVDLVKDLNSGLIGALLVCREGSLAKEKTQTLHKFILLFAVFDEGKSWHSETKNSLMQDRDAASARAWPKMHTVNGYVNRSLPGLIGCHRKSVYWHVIGMGTTPEVHSIFLEGHTFLVRNHRQASLEISPITFLTAQTLLMDLGQFLLFCHISSHQHDGMEAYVKVDSCPEEPQLRMKNNEEAEDYDDDLTDSEMDVVRFDDDNSPSFIQIRSVAKKHPKTWVHYIAAEEEDWDYAPLVLAPDDRSYKSQYLNNGPQRIGRKYKKVRFMAYTDETFKTREAIQHESGILGPLLYGEVGDTLLIIFKNQASRPYNIYPHGITDVRPLYSRRLPKGVKHLKDFPILPGEIFKYKWTVTVEDGPTKSDPRCLTRYYSSFVNMERDLASGLIGPLLICYKESVDQRGNQIMSDKRNVILFSVFDENRSWYLTENIQRFLPNPAGVQLEDPEFQASNIMHSINGYVFDSLQLSVCLHEVAYWYILSIGAQTDFLSVFFSGYTFKHKMVYEDTLTLFPFSGETVFMSMENPGLWILGCHNSDFRNRGMTALLKVSSCDKNTGDYYEDSYEDISAYLLSKNNAIEPRSFSQNGAPPGASPGTSSTGSPGASPGTSSTGSPGTPGSGTASSSPGSSTPSGATGSPGTPGSGTASSSPGSSTPSGATGSPGTPGSGTASSSPGSSTPSGATGSPGSSTPSGATGSPGSSPSASTGTGPGSSPSASTGTGPGASPGTSSTGSPGTPGSGTASSSPGSSTPSGATGSPGSSPSASTGTGPGSSPSASTGTGPGASPGTSSTGSPGASPGTSSTGSPGSSTPSGATGSPGSSPSASTGTGPGASPGTSSTGSPGSSPSASTGTGPGTPGSGTASSSPGSSTPSGATGSASSPPVLKRHQAEITRTTLQSDQEEIDYDDTISVEMKKEDFDIYDEDENQSPRSFQKKTRHYFIAAVERLWDYGMSSSPHVLRNRAQSGSVPQFKKVVFQEFTDGSFTQPLYRGELNEHLGLLGPYIRAEVEDNIMVTFRNQASRPYSFYSSLISYEEDQRQGAEPRKNFVKPNETKTYFWKVQHHMAPTKDEFDCKAWAYFSDVDLEKDVHSGLIGPLLVCHTNTLNPAHGRQVTVQEFALFFTIFDETKSWYFTENMERNCRGAPGSPAGSPTSTEEGTSESATPESGPGSEPATSGSETPASSAPCNIQMEDPTFKENYRFHAINGYIMDTLPGLVMAQDQRIRWYLLSMGSNENIHSIHFSGHVFTVRKKEEYKMALYNLYPGVFETVEMLPSKAGIWRVECLIGEHLHAGMSTLFLVYSNKCQTPLGMASGHIRDFQITASGQYGQWAPKLARLHYSGSINAWSTKEPFSWIKVDLLAPMIIHGIKTQGARQKFSSLYISQFIIMYSLDGKKWQTYRGNSTGTLMVFFGNVDSSGIKHNIFNPPIIARYIRLHPTHYSIRSTLRMELMGCDLNSCSMPLGMESKAISDAQITASSYFTNMFATWSPSKARLHLQGRSNAWRPQVNNPKEWLQVDFQKTMKVTGVTTQGVKSLLTSMYVKEFLISSSQDGHQWTLFFQNGKVKVFQGNQDSFTPVVNSLDPPLLTRYLRIHPQSWVHQIALRMEVLGCEAQDLYGAPGSPAGSPTSTEEGTSESATPESGPGSEPATSGSETPASSEQKLISEEDLSPATGHHHHHH

SEQ ID NO: 1434 - DNA, 5514 bp, synthetic construct
  misc_feature 1..5514: note = Description of Artificial Sequence: Synthetic polynucleotide
  source 1..5514: mol_type = other DNA
gccaccagaagatactacctgggtgcagtggaactgtcatgggactatatgcaaagtgatctcggtgagctgcctgtggacgcaagatttcctcctagagtgccaaaatcttttccattcaacacctcagtcgtgtacaaaaagactctgtttgtagaattcacggatcaccttttcaacatcgctaagccaaggccaccctggatgggtctgctaggtcctaccatccaggctgaggtttatgatacagtggtcattacacttaagaacatggcttcccatcctgtcagtcttcatgctgttggtgtatcctactggaaagcttctgagggagctgaatatgatgatcagaccagtcaaagggagaaagaagatgataaagtcttccctggtggaagccatacatatgtctggcaggtcctgaaagagaatggtccaatggcctctgacccactgtgccttacctactcatatctttctcatgtggacctggtaaaagacttgaattcaggcctcattggagccctactagtatgtagagaagggagtctggccaaggaaaagacacagaccttgcacaaatttatactactttttgctgtatttgatgaagggaaaagttggcactcagaaacaaagaactccttgatgcaggatagggatgctgcatctgctcgggcctggcctaaaatgcacacagtcaatggttatgtaaacaggtctctgccaggtctgattggatgccacaggaaatcagtctattggcatgtgattggaatgggcaccactcctgaagtgcactcaatattcctcgaaggtcacacatttcttgtgaggaaccatcgccaggctagcttggaaatctcgccaataactttccttactgctcaaacactcttgatggaccttggacagtttctactgttttgtcatatctcttcccaccaacatgatggcatggaagcttatgtcaaagtagacagctgtccagaggaaccccaactacgaatgaaaaataatgaagaagcggaagactatgatgatgatcttactgattctgaaatggatgtggtcaggtttgatgatgacaactctccttcctttatccaaattcgctcagttgccaagaagcatcctaaaacttgggtacattacattgctgctgaagaggaggactgggactatgctcccttagtcctcgcccccgatgacagaagttataaaagtcaatatttgaacaatggccctcagcggattggtaggaagtacaaaaaagtccgatttatggcatacacagatgaaacctttaagactcgtgaagctattcagcatgaatcaggaatcttgggacctttactttatggggaagttggagacacactgttgattatatttaagaatcaagcaagcagaccatataacatctaccctcacggaatcactgatgtccgtcctttgtattcaaggagattaccaaaaggtgtaaaacatttgaaggattttccaattctgccaggagaaatattcaaatataaatggacagtgactgtagaagatgggccaactaaatcagatcctcggtgcctgacccgctattactctagtttcgttaatatggagagagatctagcttcaggactcattggccctctcctcatctgctacaaagaatctgtagatcaaagaggaaaccagataatgtcagacaagaggaatgtcatcctgttttctgtatttgatgagaaccgaagctggtacctcacagagaatatacaacgctttctccccaatccagctggagtgcagcttgaggatccagagttccaagcctccaacatcatgcacagcatcaatggctatgtttttgatagtttgcagttgtcagtttgtttgcatgaggtggcatactggtacattctaagcattggagcacagactgacttcctttctgtcttcttctctggatataccttcaaacacaaaatggtctatgaagacacactcaccctattcccattctcaggagaaactgtcttcatgtcgatggaaaacccaggtctatggattctggggtgccacaactcagactttcggaacagaggcatgaccgccttactgaaggtttctagttgtgacaagaacactggtgattattacgaggacagttatgaagatatttcagcatacttgctgagtaaaaacaatgccattgaaccaagaagcttctctcaaaacggcgcgccaccgggagcgtcacccggtacgtcctcaacggggagccctggggcatcacccggcacgtcctcgacagggtcccccggaacaccgggttcggggactgcgtcgtcgtcacccggttcgtcaacacccagcggtgcgacgggttccccgggaacccccggatcaggaacagcgtcgtcgagccccggaagctcgaccccgtcaggagcgaccgggtcgccaggaacgcctgggtcgggtactgcctcatcgtcgccgggttcatcgacgccctccggagcaacaggttcacccgggtcgtccacccccagcggagcgactggatcaccgggatcgagcccgtcggcatcgacaggaacaggtcccggtagctccccatcggcctccacggggacggggcctggtgcgtcaccggggacaagcagcacgggttcgccgggaacgccagggtcagggaccgcgtcgtcgagcccagggtcgtccaccccaagcggggctactgggtccccgggtagctcgccgagcgcatcaacgggaaccggaccgggcagctccccctcagcgtcgacagggacaggccctggcgcgagcccgggaacatcgtcgacggggtcacccggagcatcgccagggacctcgtcaactggctcgcctggatcgtcaacgccctcgggagccacggggtcgcccggatcatccccgtccgcctcaactggcacaggccctggtgcttcccctggaacgtccagcacaggctcccccggttccagcccttccgcttcgactgggactggacccggaaccccgggatcggggacagcgtcaagctcgcccggaagctccacgccttcgggggcaaccgggtcagcctcgagcccaccagtcttgaaacgccatcaagctgaaataactcgtactactcttcagtcagatcaagaggaaatcgattatgatgataccatatcagttgaaatgaagaaggaagattttgacatttatgatgaggatgaaaatcagagcccccgcagctttcaaaagaaaacacgacactattttattgctgcagtggagaggctctgggattatgggatgagtagctccccacatgttctaagaaacagggctcagagtggcagtgtccctcagttcaagaaagttgttttccaggaatttactgatggctcctttactcagcccttataccgtggagaactaaatgaacatttgggactcctggggccatatataagagcagaagttgaagataatatcatggtaactttcagaaatcaggcctctcgtccctattccttctattctagccttatttcttatgaggaagatcagaggcaaggagcagaacctagaaaaaactttgtcaagcctaatgaaaccaaaacttacttttggaaagtgcaacatcatatggcacccactaaagatgagtttgactgcaaagcctgggcttatttctctgatgttgacctggaaaaagatgtgcactcaggcctgattggaccccttctggtctgccacactaacacactgaaccctgctcatgggagacaagtgacagtacaggaatttgctctgtttttcaccatctttgatgagaccaaaagctggtacttcactgaaaatatggaaagaaactgcaggggcgcgccaggttctcctgctggctcccccacctcaacagaagaggggacaagcgaaagcgctacgcctgagagtggccctggctctgagccagccacctccggctctgaaacccctgcctcgagcgctccctgcaatatccagatggaagatcccacttttaaagagaattatcgcttccatgcaatcaatggctacataatggatacactacctggcttagtaatggctcaggatcaaaggattcgatggtatctgctcagcatgggcagcaatgaaaacatccattctattcatttcagtggacatgtgttcactgtacgaaaaaaagaggagtataaaatggcactgtacaatctctatccaggtgtttttgagacagtggaaatgttaccatccaaagctggaatttggcgggtggaatgccttattggcgagcatctacatgctgggatgagcacactttttctggtgtacagcaataagtgtcagactcccctgggaatggcttctggacacattagagattttcagattacagcttcaggacaatatggacagtgggccccaaagctggccagacttcattattccggatcaatcaatgcctggagcaccaaggagcccttttcttggatcaaggtggatctgttggcaccaatgattattcacggcatcaagacccagggtgcccgtcagaagttctccagcctctacatctctcagtttatcatcatgtatagtcttgatgggaagaagtggcagacttatcgaggaaattccactggaaccttaatggtcttctttggcaatgtggattcatctgggataaaacacaatatttttaaccctccaattattgctcgatacatccgtttgcacccaactcattatagcattcgcagcactcttcgcatggagttgatgggctgtgatttaaatagttgcagcatgccattgggaatggagagtaaagcaatatcagatgcacagattactgcttcatcctactttaccaatatgtttgccacctggtctccttcaaaagctcgacttcacctccaagggaggagtaatgcctggagacctcaggtgaataatccaaaagagtggctgcaagtggacttccagaagacaatgaaagtcacaggagtaactactcagggagtaaaatctctgcttaccagcatgtatgtgaaggagttcctcatctccagcagtcaagatggccatcagtggactctcttttttcagaatggcaaagtaaaggtttttcagggaaatcaagactccttcacacctgtggtgaactctctagacccaccgttactgactcgctaccttcgaattcacccccagagttgggtgcaccagattgccctgaggatggaggttctgggctgcgaggcacaggacctctacggcgcgccaggttctcctgctggctcccccacctcaacagaagaggggacaagcgaaagcgctacgcctgagagtggccctggctctgagccagccacctccggctctgaaacccctgcctcgagcgaacaaaaactcatctcagaagaggatctgtcacctgcaaccggtcatcatcaccatcaccattga

SEQ ID NO: 1435 - protein, 1945 aa, synthetic construct
  REGION 1..1945: note = Description of Artificial Sequence: Synthetic polypeptide
ATRRYYLGAVELSWDYMQSDLGELPVDARFPPRVPKSFPFNTSVVYKKTLFVEFTDHLFNIAKPRPPWMGLLGPTIQAEVYDTVVITLKNMASHPVSLHAVGVSYWKASEGAEYDDQTSQREKEDDKVFPGGSHTYVWQVLKENGPMASDPLCLTYSYLSHVDLVKDLNSGLIGALLVCREGSLAKEKTQTLHKFILLFAVFDEGKSWHSETKNSLMQDRDAASARAWPKMHTVNGYVNRSLPGLIGCHRKSVYWHVIGMGTTPEVHSIFLEGHTFLVRNHRQASLEISPITFLTAQTLLMDLGQFLLFCHISSHQHDGMEAYVKVDSCPEEPQLRMKNNEEAEDYDDDLTDSEMDVVRFDDDNSPSFIQIRSVAKKHPKTWVHYIAAEEEDWDYAPLVLAPDDRSYKSQYLNNGPQRIGRKYKKVRFMAYTDETFKTREAIQHESGILGPLLYGEVGDTLLIIFKNQASRPYNIYPHGITDVRPLYSRRLPKGVKHLKDFPILPGEIFKYKWTVTVEDGPTKSDPRCLTRYYSSFVNMERDLASGLIGPLLICYKESVDQRGNQIMSDKRNVILFSVFDENRSWYLTENIQRFLPNPAGVQLEDPEFQASNIMHSINGYVFDSLQLSVCLHEVAYWYILSIGAQTDFLSVFFSGYTFKHKMVYEDTLTLFPFSGETVFMSMENPGLWILGCHNSDFRNRGMTALLKVSSCDKNTGDYYEDSYEDISAYLLSKNNAIEPRSFSQNGAPPGASPGTSSTGSPGASPGTSSTGSPGTPGSGTASSSPGSSTPSGATGSPGTPGSGTASSSPGSSTPSGATGSPGTPGSGTASSSPGSSTPSGATGSPGSSTPSGATGSPGSSPSASTGTGPGSSPSASTGTGPGASPGTSSTGSPGTPGSGTASSSPGSSTPSGATGSPGSSPSASTGTGPGSSPSASTGTGPGASPGTSSTGSPGASPGTSSTGSPGSSTPSGATGSPGSSPSASTGTGPGASPGTSSTGSPGSSPSASTGTGPGTPGSGTASSSPGSSTPSGATGSASSPPVLKRHQAEITRTTLQSDQEEIDYDDTISVEMKKEDFDIYDEDENQSPRSFQKKTRHYFIAAVERLWDYGMSSSPHVLRNRAQSGSVPQFKKVVFQEFTDGSFTQPLYRGELNEHLGLLGPYIRAEVEDNIMVTFRNQASRPYSFYSSLISYEEDQRQGAEPRKNFVKPNETKTYFWKVQHHMAPTKDEFDCKAWAYFSDVDLEKDVHSGLIGPLLVCHTNTLNPAHGRQVTVQEFALFFTIFDETKSWYFTENMERNCRGAPGTPGSGTASSSPGASPGTSSTGSPGASPGTSSTGSPGASPGTSSTGSPGSSPSASTGTGPGTPGSGTASSSPGASPGTSSTGSPGASPGTSSTGSPGASPGTSSTGSPGSSTPSGATGSPGSSTPSGATGSPGASPGTSSTGSPASSAPCNIQMEDPTFKENYRFHAINGYIMDTLPGLVMAQDQRIRWYLLSMGSNENIHSIHFSGHVFTVRKKEEYKMALYNLYPGVFETVEMLPSKAGIWRVECLIGEHLHAGMSTLFLVYSNKCQTPLGMASGHIRDFQITASGQYGQWAPKLARLHYSGSINAWSTKEPFSWIKVDLLAPMIIHGIKTQGARQKFSSLYISQFIIMYSLDGKKWQTYRGNSTGTLMVFFGNVDSSGIKHNIFNPPIIARYIRLHPTHYSIRSTLRMELMGCDLNSCSMPLGMESKAISDAQITASSYFTNMFATWSPSKARLHLQGRSNAWRPQVNNPKEWLQVDFQKTMKVTGVTTQGVKSLLTSMYVKEFLISSSQDGHQWTLFFQNGKVKVFQGNQDSFTPVVNSLDPPLLTRYLRIHPQSWVHQIALRMEVLGCEAQDLYGAPGSPAGSPTSTEEGTSESATPESGPGSEPATSGSETPASSEQKLISEEDLSPATGHHHHHH

SEQ ID NO: 1436 - DNA, 5838 bp, synthetic construct
  misc_feature 1..5838: note = Description of Artificial Sequence: Synthetic polynucleotide
  source 1..5838: mol_type = other DNA
gccaccagaagatactacctgggtgcagtggaactgtcatgggactatatgcaaagtgatctcggtgagctgcctgtggacgcaagatttcctcctagagtgccaaaatcttttccattcaacacctcagtcgtgtacaaaaagactctgtttgtagaattcacggatcaccttttcaacatcgctaagccaaggccaccctggatgggtctgctaggtcctaccatccaggctgaggtttatgatacagtggtcattacacttaagaacatggcttcccatcctgtcagtcttcatgctgttggtgtatcctactggaaagcttctgagggagctgaatatgatgatcagaccagtcaaagggagaaagaagatgataaagtcttccctggtggaagccatacatatgtctggcaggtcctgaaagagaatggtccaatggcctctgacccactgtgccttacctactcatatctttctcatgtggacctggtaaaagacttgaattcaggcctcattggagccctactagtatgtagagaagggagtctggccaaggaaaagacacagaccttgcacaaatttatactactttttgctgtatttgatgaagggaaaagttggcactcagaaacaaagaactccttgatgcaggatagggatgctgcatctgctcgggcctggcctaaaatgcacacagtcaatggttatgtaaacaggtctctgccaggtctgattggatgccacaggaaatcagtctattggcatgtgattggaatgggcaccactcctgaagtgcactcaatattcctcgaaggtcacacatttcttgtgaggaaccatcgccaggctagcttggaaatctcgccaataactttccttactgctcaaacactcttgatggaccttggacagtttctactgttttgtcatatctcttcccaccaacatgatggcatggaagcttatgtcaaagtagacagctgtccagaggaaccccaactacgaatgaaaaataatgaagaagcggaagactatgatgatgatcttactgattctgaaatggatgtggtcaggtttgatgatgacaactctccttcctttatccaaattcgctcagttgccaagaagcatcctaaaacttgggtacattacattgctgctgaagaggaggactgggactatgctcccttagtcctcgcccccgatgacagaagttataaaagtcaatatttgaacaatggccctcagcggattggtaggaagtacaaaaaagtccgatttatggcatacacagatgaaacctttaagactcgtgaagctattcagcatgaatcaggaatcttgggacctttactttatggggaagttggagacacactgttgattatatttaagaatcaagcaagcagaccatataacatctaccctcacggaatcactgatgtccgtcctttgtattcaaggagattaccaaaaggtgtaaaacatttgaaggattttccaattctgccaggagaaatattcaaatataaatggacagtgactgtagaagatgggccaactaaatcagatcctcggtgcctgacccgctattactctagtttcgttaatatggagagagatctagcttcaggactcattggccctctcctcatctgctacaaagaatctgtagatcaaagaggaaaccagataatgtcagacaagaggaatgtcatcctgttttctgtatttgatgagaaccgaagctggtacctcacagagaatatacaacgctttctccccaatccagctggagtgcagcttgaggatccagagttccaagcctccaacatcatgcacagcatcaatggctatgtttttgatagtttgcagttgtcagtttgtttgcatgaggtggcatactggtacattctaagcattggagcacagactgacttcctttctgtcttcttctctggatataccttcaaacacaaaatggtctatgaagacacactcaccctattcccattctcaggagaaactgtcttcatgtcgatggaaaacccaggtctatggattctggggtgccacaactcagactttcggaacagaggcatgaccgccttactgaaggtttctagttgtgacaagaacactggtgattattacgaggacagttatgaagatatttcagcatacttgctgagtaaaaacaatgccattgaaccaagaagcttctctcaaaacggcgcgccaccgggagcgtcacccggtacgtcctcaacggggagccctggggcatcacccggcacgtcctcgacagggtcccccggaacaccgggttcggggactgcgtcgtcgtcacccggttcgtcaacacccagcggtgcgacgggttccccgggaacccccggatcaggaacagcgtcgtcgagccccggaagctcgaccccgtcaggagcgaccgggtcgccaggaacgcctgggtcgggtactgcctcatcgtcgccgggttcatcgacgccctccggagcaacaggttcacccgggtcgtccacccccagcggagcgactggatcaccgggatcgagcccgtcggcatcgacaggaacaggtcccggtagctccccatcggcctccacggggacggggcctggtgcgtcaccggggacaagcagcacgggttcgccgggaacgccagggtcagggaccgcgtcgtcgagcccagggtcgtccaccccaagcggggctactgggtccccgggtagctcgccgagcgcatcaacgggaaccggaccgggcagctccccctcagcgtcgacagggacaggccctggcgcgagcccgggaacatcgtcgacggggtcacccggagcatcgccagggacctcgtcaactggctcgcctggatcgtcaacgccctcgggagccacggggtcgcccggatcatccccgtccgcctcaactggcacaggccctggtgcttcccctggaacgtccagcacaggctcccccggttccagcccttccgcttcgactgggactggacccggaaccccgggatcggggacagcgtcaagctcgcccggaagctccacgccttcgggggcaaccgggtcagcctcgagcccaccagtcttgaaacgccatcaagctgaaataactcgtactactcttcagtcagatcaagaggaaatcgattatgatgataccatatcagttgaaatgaagaaggaagattttgacatttatgatgaggatgaaaatcagagcccccgcagctttcaaaagaaaacacgacactattttattgctgcagtggagaggctctgggattatgggatgagtagctccccacatgttctaagaaacagggctcagagtggcagtgtccctcagttcaagaaagttgttttccaggaatttactgatggctcctttactcagcccttataccgtggagaactaaatgaacatttgggactcctggggccatatataagagcagaagttgaagataatatcatggtaactttcagaaatcaggcctctcgtccctattccttctattctagccttatttcttatgaggaagatcagaggcaaggagcagaacctagaaaaaactttgtcaagcctaatgaaaccaaaacttacttttggaaagtgcaacatcatatggcacccactaaagatgagtttgactgcaaagcctgggcttatttctctgatgttgacctggaaaaagatgtgcactcaggcctgattggaccccttctggtctgccacactaacacactgaaccctgctcatgggagacaagtgacagtacaggaatttgctctgtttttcaccatctttgatgagaccaaaagctggtacttcactgaaaatatggaaagaaactgcaggggcgcgccaggtacacccggatcgggtacagcgtcatcgagccccggtgcgtcacctggtacgtcgagcacggggtcgccaggggcgtcccctgggacgtcctcaacaggctcgcccggtgcgtcacccggcacgtcgtccacgggttcacctggtagctccccttccgcgtccactggcaccgggcctggaactccggggagcggcacagcgagctcgtcgccgggagcatcgcctgggacatcgagcaccgggtcgccaggagcatcgcccggaacatccagcacaggaagccccggcgcgtcgcccgggacatcaagcacaggttccccgggatcgagcacgccgtccggagccactggatcaccagggagctcgacaccttccggcgcaacgggatcgcccggagccagcccgggtacgtcaagcactggctcccctgcctcgagcgctccctgcaatatccagatggaagatcccacttttaaagagaattatcgcttccatgcaatcaatggctacataatggatacactacctggcttagtaatggctcaggatcaaaggattcgatggtatctgctcagcatgggcagcaatgaaaacatccattctattcatttcagtggacatgtgttcactgtacgaaaaaaagaggagtataaaatggcactgtacaatctctatccaggtgtttttgagacagtggaaatgttaccatccaaagctggaatttggcgggtggaatgccttattggcgagcatctacatgctgggatgagcacactttttctggtgtacagcaataagtgtcagactcccctgggaatggcttctggacacattagagattttcagattacagcttcaggacaatatggacagtgggccccaaagctggccagacttcattattccggatcaatcaatgcctggagcaccaaggagcccttttcttggatcaaggtggatctgttggcaccaatgattattcacggcatcaagacccagggtgcccgtcagaagttctccagcctctacatctctcagtttatcatcatgtatagtcttgatgggaagaagtggcagacttatcgaggaaattccactggaaccttaatggtcttctttggcaatgtggattcatctgggataaaacacaatatttttaaccctccaattattgctcgatacatccgtttgcacccaactcattatagcattcgcagcactcttcgcatggagttgatgggctgtgatttaaatagttgcagcatgccattgggaatggagagtaaagcaatatcagatgcacagattactgcttcatcctactttaccaatatgtttgccacctggtctccttcaaaagctcgacttcacctccaagggaggagtaatgcctggagacctcaggtgaataatccaaaagagtggctgcaagtggacttccagaagacaatgaaagtcacaggagtaactactcagggagtaaaatctctgcttaccagcatgtatgtgaaggagttcctcatctccagcagtcaagatggccatcagtggactctcttttttcagaatggcaaagtaaaggtttttcagggaaatcaagactccttcacacctgtggtgaactctctagacccaccgttactgactcgctaccttcgaattcacccccagagttgggtgcaccagattgccctgaggatggaggttctgggctgcgaggcacaggacctctacggcgcgccaggttctcctgctggctcccccacctcaacagaagaggggacaagcgaaagcgctacgcctgagagtggccctggctctgagccagccacctccggctctgaaacccctgcctcgagcgaacaaaaactcatctcagaagaggatctgtcacctgcaaccggtcatcatcaccatcaccattga

SEQ ID NO: 1437 - protein, 2089 aa, synthetic construct
  REGION 1..2089: note = Description of Artificial Sequence: Synthetic polypeptide
ATRRYYLGAVELSWDYMQSDLGELPVDARFPPRVPKSFPFNTSVVYKKTLFVEFTDHLFNIAKPRPPWMGLLGPTIQAEVYDTVVITLKNMASHPVSLHAVGVSYWKASEGAEYDDQTSQREKEDDKVFPGGSHTYVWQVLKENGPMASDPLCLTYSYLSHVDLVKDLNSGLIGALLVCREGSLAKEKTQTLHKFILLFAVFDEGKSWHSETKNSLMQDRDAASARAWPKMHTVNGYVNRSLPGLIGCHRKSVYWHVIGMGTTPEVHSIFLEGHTFLVRNHRQASLEISPITFLTAQTLLMDLGQFLLFCHISSHQHDGMEAYVKVDSCPEEPQLRMKNNEEAEDYDDDLTDSEMDVVRFDDDNSPSFIQIRSVAKKHPKTWVHYIAAEEEDWDYAPLVLAPDDRSYKSQYLNNGPQRIGRKYKKVRFMAYTDETFKTREAIQHESGILGPLLYGEVGDTLLIIFKNQASRPYNIYPHGITDVRPLYSRRLPKGVKHLKDFPILPGEIFKYKWTVTVEDGPTKSDPRCLTRYYSSFVNMERDLASGLIGPLLICYKESVDQRGNQIMSDKRNVILFSVFDENRSWYLTENIQRFLPNPAGVQLEDPEFQASNIMHSINGYVFDSLQLSVCLHEVAYWYILSIGAQTDFLSVFFSGYTFKHKMVYEDTLTLFPFSGETVFMSMENPGLWILGCHNSDFRNRGMTALLKVSSCDKNTGDYYEDSYEDISAYLLSKNNAIEPRSFSQNGAPPGASPGTSSTGSPGASPGTSSTGSPGTPGSGTASSSPGSSTPSGATGSPGTPGSGTASSSPGSSTPSGATGSPGTPGSGTASSSPGSSTPSGATGSPGSSTPSGATGSPGSSPSASTGTGPGSSPSASTGTGPGASPGTSSTGSPGTPGSGTASSSPGSSTPSGATGSPGSSPSASTGTGPGSSPSASTGTGPGASPGTSSTGSPGASPGTSSTGSPGSSTPSGATGSPGSSPSASTGTGPGASPGTSSTGSPGSSPSASTGTGPGTPGSGTASSSPGSSTPSGATGSASSPPVLKRHQAEITRTTLQSDQEEIDYDDTISVEMKKEDFDIYDEDENQSPRSFQKKTRHYFIAAVERLWDYGMSSSPHVLRNRAQSGSVPQFKKVVFQEFTDGSFTQPLYRGELNEHLGLLGPYIRAEVEDNIMVTFRNQASRPYSFYSSLISYEEDQRQGAEPRKNFVKPNETKTYFWKVQHHMAPTKDEFDCKAWAYFSDVDLEKDVHSGLIGPLLVCHTNTLNPAHGRQVTVQEFALFFTIFDETKSWYFTENMERNCRGAPGTPGSGTASSSPGSSTPSGATGSPGSSTPSGATGSPGSSTPSGATGSPGSSPSASTGTGPGASPGTSSTGSPGASPGTSSTGSPGTPGSGTASSSPGASPGTSSTGSPGASPGTSSTGSPGASPGTSSTGSPGASPGTSSTGSPGTPGSGTASSSPGSSTPSGATGSPGTPGSGTASSSPGSSTPSGATGSPGTPGSGTASSSPGSSTPSGATGSPGSSTPSGATGSPGSSPSASTGTGPGSSPSASTGTGPGASPGTSSTGSPGTPGSGTASSSPGSSTPSGATGSPASSAPCNIQMEDPTFKENYRFHAINGYIMDTLPGLVMAQDQRIRWYLLSMGSNENIHSIHFSGHVFTVRKKEEYKMALYNLYPGVFETVEMLPSKAGIWRVECLIGEHLHAGMSTLFLVYSNKCQTPLGMASGHIRDFQITASGQYGQWAPKLARLHYSGSINAWSTKEPFSWIKVDLLAPMIIHGIKTQGARQKFSSLYISQFIIMYSLDGKKWQTYRGNSTGTLMVFFGNVDSSGIKHNIFNPPIIARYIRLHPTHYSIRSTLRMELMGCDLNSCSMPLGMESKAISDAQITASSYFTNMFATWSPSKARLHLQGRSNAWRPQVNNPKEWLQVDFQKTMKVTGVTTQGVKSLLTSMYVKEFLISSSQDGHQWTLFFQNGKVKVFQGNQDSFTPVVNSLDPPLLTRYLRIHPQSWVHQIALRMEVLGCEAQDLYGAPGSPAGSPTSTEEGTSESATPESGPGSEPATSGSETPASSEQKLISEEDLSPATGHHHHHH

SEQ ID NO: 1438 - DNA, 6270 bp, synthetic construct
  misc_feature 1..6270: note = Description of Artificial Sequence: Synthetic polynucleotide
  source 1..6270: mol_type = other DNA
gccaccagaagatactacctgggtgcagtggaactgtcatgggactatatgcaaagtgatctcggtgagctgcctgtggacgcaagatttcctcctagagtgccaaaatcttttccattcaacacctcagtcgtgtacaaaaagactctgtttgtagaattcacggatcaccttttcaacatcgctaagccaaggccaccctggatgggtctgctaggtcctaccatccaggctgaggtttatgatacagtggtcattacacttaagaacatggcttcccatcctgtcagtcttcatgctgttggtgtatcctactggaaagcttctgagggagctgaatatgatgatcagaccagtcaaagggagaaagaagatgataaagtcttccctggtggaagccatacatatgtctggcaggtcctgaaagagaatggtccaatggcctctgacccactgtgccttacctactcatatctttctcatgtggacctggtaaaagacttgaattcaggcctcattggagccctactagtatgtagagaagggagtctggccaaggaaaagacacagaccttgcacaaatttatactactttttgctgtatttgatgaagggaaaagttggcactcagaaacaaagaactccttgatgcaggatagggatgctgcatctgctcgggcctggcctaaaatgcacacagtcaatggttatgtaaacaggtctctgccaggtctgattggatgccacaggaaatcagtctattggcatgtgattggaatgggcaccactcctgaagtgcactcaatattcctcgaaggtcacacatttcttgtgaggaaccatcgccaggctagcttggaaatctcgccaataactttccttactgctcaaacactcttgatggaccttggacagtttctactgttttgtcatatctcttcccaccaacatgatggcatggaagcttatgtcaaagtagacagctgtccagaggaaccccaactacgaatgaaaaataatgaagaagcggaagactatgatgatgatcttactgattctgaaatggatgtggtcaggtttgatgatgacaactctccttcctttatccaaattcgctcagttgccaagaagcatcctaaaacttgggtacattacattgctgctgaagaggaggactgggactatgctcccttagtcctcgcccccgatgacagaagttataaaagtcaatatttgaacaatggccctcagcggattggtaggaagtacaaaaaagtccgatttatggcatacacagatgaaacctttaagactcgtgaagctattcagcatgaatcaggaatcttgggacctttactttatggggaagttggagacacactgttgattatatttaagaatcaagcaagcagaccatataacatctaccctcacggaatcactgatgtccgtcctttgtattcaaggagattaccaaaaggtgtaaaacatttgaaggattttccaattctgccaggagaaatattcaaatataaatggacagtgactgtagaagatgggccaactaaatcagatcctcggtgcctgacccgctattactctagtttcgttaatatggagagagatctagcttcaggactcattggccctctcctcatctgctacaaagaatctgtagatcaaagaggaaaccagataatgtcagacaagaggaatgtcatcctgttttctgtatttgatgagaaccgaagctggtacctcacagagaatatacaacgctttctccccaatccagctggagtgcagcttgaggatccagagttccaagcctccaacatcatgcacagcatcaatggctatgtttttgatagtttgcagttgtcagtttgtttgcatgaggtggcatactggtacattctaagcattggagcacagactgacttcctttctgtcttcttctctggatataccttcaaacacaaaatggtctatgaagacacactcaccctattcccattctcaggagaaactgtcttcatgtcgatggaaaacccaggtctatggattctggggtgccacaactcagactttcggaacagaggcatgaccgccttactgaaggtttctagttgtgacaagaacactggtgattattacgaggacagttatgaagatatttcagcatacttgctgagtaaaaacaatgccattgaaccaagaagcttctctcaaaacggcgcgccaccgggagcgtcacccggtacgtcctcaacggggagccctggggcatcacccggcacgtcctcgacagggtcccccggaacaccgggttcggggactgcgtcgtcgtcacccggttcgtcaacacccagcggtgcgacgggttccccgggaacccccggatcaggaacagcgtcgtcgagccccggaagctcgaccccgtcaggagcgaccgggtcgccaggaacgcctgggtcgggtactgcctcatcgtcgccgggttcatcgacgccctccggagcaacaggttcacccgggtcgtccacccccagcggagcgactggatcaccgggatcgagcccgtcggcatcgacaggaacaggtcccggtagctccccatcggcctccacggggacggggcctggtgcgtcaccggggacaagcagcacgggttcgccgggaacgccagggtcagggaccgcgtcgtcgagcccagggtcgtccaccccaagcggggctactgggtccccgggtagctcgccgagcgcatcaacgggaaccggaccgggcagctccccctcagcgtcgacagggacaggccctggcgcgagcccgggaacatcgtcgacggggtcacccggagcatcgccagggacctcgtcaactggctcgcctggatcgtcaacgccctcgggagccacggggtcgcccggatcatccccgtccgcctcaactggcacaggccctggtgcttcccctggaacgtccagcacaggctcccccggttccagcccttccgcttcgactgggactggacccggaaccccgggatcggggacagcgtcaagctcgcccggaagctccacgccttcgggggcaaccgggtcagcctcgagcccaccagtcttgaaacgccatcaagctgaaataactcgtactactcttcagtcagatcaagaggaaatcgattatgatgataccatatcagttgaaatgaagaaggaagattttgacatttatgatgaggatgaaaatcagagcccccgcagctttcaaaagaaaacacgacactattttattgctgcagtggagaggctctgggattatgggatgagtagctccccacatgttctaagaaacagggctcagagtggcagtgtccctcagttcaagaaagttgttttccaggaatttactgatggctcctttactcagcccttataccgtggagaactaaatgaacatttgggactcctggggccatatataagagcagaagttgaagataatatcatggtaactttcagaaatcaggcctctcgtccctattccttctattctagccttatttcttatgaggaagatcagaggcaaggagcagaacctagaaaaaactttgtcaagcctaatgaaaccaaaacttacttttggaaagtgcaacatcatatggcacccactaaagatgagtttgactgcaaagcctgggcttatttctctgatgttgacctggaaaaagatgtgcactcaggcctgattggaccccttctggtctgccacactaacacactgaaccctgctcatgggagacaagtgacagtacaggaatttgctctgtttttcaccatctttgatgagaccaaaagctggtacttcactgaaaatatggaaagaaactgcaggggcgcgccaggtacgcccgggtcgggaacagcgtcctcaagcccgggtagctcgacgccgtcaggagccacagggtcgccgggatcgtcgactccatcaggcgcaacgggatcgcctggatcaagcactccatccggagcgacgggaagcccagggagctccccgtccgcatcgactgggacgggacctggagcaagccccggtacgtcgtcaacaggttcgcctggtgcctcgcctggcacgtccagcacggggagccccggaacgccgggttccggaaccgcatcctcctcaccaggtgcctcaccgggcacctcatcaacgggatcaccaggggcttcaccgggaacgagctcgacgggttcaccgggagcgtccccggggacttcgtcgacaggtagcccaggggcaagccccggtacatcgtcaacgggttccccagggacaccggggagcggtactgcatcgtcctcacccggttcctcgacacccagcggagccacgggttcgcccggtactccggggtccggaacggccagcagctcacccggttcctcgacgccatcaggtgccacgggctcgcctggaacgccaggctcgggcactgcgagcagcagccctggatcatcaacgcctagcggagcgaccggctcccctggatcgtcaactccctcgggcgcgactgggagcccaggaagctcaccgtcggcctcgacgggaacagggcctggttcgagcccctcagcttcaacaggaacaggtccaggcgcgtcgccaggtacatcatcgacgggttcgcctgggacccctgggtccggtactgcctcatcatcgcccggatcgtccaccccctcgggagcgacaggttcgcctgcctcgagcgctccctgcaatatccagatggaagatcccacttttaaagagaattatcgcttccatgcaatcaatggctacataatggatacactacctggcttagtaatggctcaggatcaaaggattcgatggtatctgctcagcatgggcagcaatgaaaacatccattctattcatttcagtggacatgtgttcactgtacgaaaaaaagaggagtataaaatggcactgtacaatctctatccaggtgtttttgagacagtggaaatgttaccatccaaagctggaatttggcgggtggaatgccttattggcgagcatctacatgctgggatgagcacactttttctggtgtacagcaataagtgtcagactcccctgggaatggcttctggacacattagagattttcagattacagcttcaggacaatatggacagtgggccccaaagctggccagacttcattattccggatcaatcaatgcctggagcaccaaggagcccttttcttggatcaaggtggatctgttggcaccaatgattattcacggcatcaagacccagggtgcccgtcagaagttctccagcctctacatctctcagtttatcatcatgtatagtcttgatgggaagaagtggcagacttatcgaggaaattccactggaaccttaatggtcttctttggcaatgtggattcatctgggataaaacacaatatttttaaccctccaattattgctcgatacatccgtttgcacccaactcattatagcattcgcagcactcttcgcatggagttgatgggctgtgatttaaatagttgcagcatgccattgggaatggagagtaaagcaatatcagatgcacagattactgcttcatcctactttaccaatatgtttgccacctggtctccttcaaaagctcgacttcacctccaagggaggagtaatgcctggagacctcaggtgaataatccaaaagagtggctgcaagtggacttccagaagacaatgaaagtcacaggagtaactactcagggagtaaaatctctgcttaccagcatgtatgtgaaggagttcctcatctccagcagtcaagatggccatcagtggactctcttttttcagaatggcaaagtaaaggtttttcagggaaatcaagactccttcacacctgtggtgaactctctagacccaccgttactgactcgctaccttcgaattcacccccagagttgggtgcaccagattgccctgaggatggaggttctgggctgcgaggcacaggacctctacggcgcgccaggttctcctgctggctcccccacctcaacagaagaggggacaagcgaaagcgctacgcctgagagtggccctggctctgagccagccacctccggctctgaaacccctgcctcgagcgaacaaaaactcatctcagaagaggatctgtcacctgcaaccggtcatcatcaccatcaccattga

SEQ ID NO: 1439 - protein, 1693 aa, synthetic construct
  REGION 1..1693: note = Description of Artificial Sequence: Synthetic polypeptide
ATRRYYLGAVELSWDYMQSDLGELPVDARFPPRVPKSFPFNTSVVYKKTLFVEFTDHLFNIAKPRPPWMGLLGPTIQAEVYDTVVITLKNMASHPVSLHAVGVSYWKASEGAEYDDQTSQREKEDDKVFPGGSHTYVWQVLKENGPMASDPLCLTYSYLSHVDLVKDLNSGLIGALLVCREGSLAKEKTQTLHKFILLFAVFDEGKSWHSETKNSLMQDRDAASARAWPKMHTVNGYVNRSLPGLIGCHRKSVYWHVIGMGTTPEVHSIFLEGHTFLVRNHRQASLEISPITFLTAQTLLMDLGQFLLFCHISSHQHDGMEAYVKVDSCPEEPQLRMKNNEEAEDYDDDLTDSEMDVVRFDDDNSPSFIQIRSVAKKHPKTWVHYIAAEEEDWDYAPLVLAPDDRSYKSQYLNNGPQRIGRKYKKVRFMAYTDETFKTREAIQHESGILGPLLYGEVGDTLLIIFKNQASRPYNIYPHGITDVRPLYSRRLPKGVKHLKDFPILPGEIFKYKWTVTVEDGPTKSDPRCLTRYYSSFVNMERDLASGLIGPLLICYKESVDQRGNQIMSDKRNVILFSVFDENRSWYLTENIQRFLPNPAGVQLEDPEFQASNIMHSINGYVFDSLQLSVCLHEVAYWYILSIGAQTDFLSVFFSGYTFKHKMVYEDTLTLFPFSGETVFMSMENPGLWILGCHNSDFRNRGMTALLKVSSCDKNTGDYYEDSYEDISAYLLSKNNAIEPRSFSQNGAPGSPAGSPTSTEEGTSESATPESGPGSEPATSGSETPASSPPVLKRHQAEITRTTLQSDQEEIDYDDTISVEMKKEDFDIYDEDENQSPRSFQKKTRHYFIAAVERLWDYGMSSSPHVLRNRAQSGSVPQFKKVVFQEFTDGSFTQPLYRGELNEHLGLLGPYIRAEVEDNIMVTFRNQASRPYSFYSSLISYEEDQRQGAEPRKNFVKPNETKTYFWKVQHHMAPTKDEFDCKAWAYFSDVDLEKDVHSGLIGPLLVCHTNTLNPAHGRQVTVQEFALFFTIFDETKSWYFTENMERNCRGAPGSPAGSPTSTEEGTSESATPESGPGSEPATSGSETPASSAPCNIQMEDPTFKENYRFHAINGYIMDTLPGLVMAQDQRIRWYLLSMGSNENIHSIHFSGHVFTVRKKEEYKMALYNLYPGVFETVEMLPSKAGIWRVECLIGEHLHAGMSTLFLVYSNKCQTPLGMASGHIRDFQITASGQYGQWAPKLARLHYSGSINAWSTKEPFSWIKVDLLAPMIIHGIKTQGARQKFSSLYISQFIIMYSLDGKKWQTYRGNSTGTLMVFFGNVDSSGIKHNIFNPPIIARYIRLHPTHYSIRSTLRMELMGCDLNSCSMPLGMESKAISDAQITASSYFTNMFATWSPSKARLHLQGRSNAWRPQVNNPKEWLQVDFQKTMKVTGVTTQGVKSLLTSMYVKEFLISSSQDGHQWTLFFQNGKVKVFQGNQDSFTPVVNSLDPPLLTRYLRIHPQSWVHQIALRMEVLGCEAQDLYGAPPGSSPSASTGTGPGSSPSASTGTGPGTPGSGTASSSPGSSTPSGATGSPGSSPSASTGTGPGASPGTSSTGSPGTPGSGTASSSPGSSTPSGATGSPGTPGSGTASSSPGASPGTSSTGSPGASPGTSSTGSPGTPGSGTASSSASSEQKLISEEDLSPATGHHHHHH

SEQ ID NO: 1440 - DNA, 5082 bp, synthetic construct
  misc_feature 1..5082: note = Description of Artificial Sequence: Synthetic polynucleotide
  source 1..5082: mol_type = other DNA
gccaccagaagatactacctgggtgcagtggaactgtcatgggactatatgcaaagtgatctcggtgagctgcctgtggacgcaagatttcctcctagagtgccaaaatcttttccattcaacacctcagtcgtgtacaaaaagactctgtttgtagaattcacggatcaccttttcaacatcgctaagccaaggccaccctggatgggtctgctaggtcctaccatccaggctgaggtttatgatacagtggtcattacacttaagaacatggcttcccatcctgtcagtcttcatgctgttggtgtatcctactggaaagcttctgagggagctgaatatgatgatcagaccagtcaaagggagaaagaagatgataaagtcttccctggtggaagccatacatatgtctggcaggtcctgaaagagaatggtccaatggcctctgacccactgtgccttacctactcatatctttctcatgtggacctggtaaaagacttgaattcaggcctcattggagccctactagtatgtagagaagggagtctggccaaggaaaagacacagaccttgcacaaatttatactactttttgctgtatttgatgaagggaaaagttggcactcagaaacaaagaactccttgatgcaggatagggatgctgcatctgctcgggcctggcctaaaatgcacacagtcaatggttatgtaaacaggtctctgccaggtctgattggatgccacaggaaatcagtctattggcatgtgattggaatgggcaccactcctgaagtgcactcaatattcctcgaaggtcacacatttcttgtgaggaaccatcgccaggctagcttggaaatctcgccaataactttccttactgctcaaacactcttgatggaccttggacagtttctactgttttgtcatatctcttcccaccaacatgatggcatggaagcttatgtcaaagtagacagctgtccagaggaaccccaactacgaatgaaaaataatgaagaagcggaagactatgatgatgatcttactgattctgaaatggatgtggtcaggtttgatgatgacaactctccttcctttatccaaattcgctcagttgccaagaagcatcctaaaacttgggtacattacattgctgctgaagaggaggactgggactatgctcccttagtcctcgcccccgatgacagaagttataaaagtcaatatttgaacaatggccctcagcggattggtaggaagtacaaaaaagtccgatttatggcatacacagatgaaacctttaagactcgtgaagctattcagcatgaatcaggaatcttgggacctttactttatggggaagttggagacacactgttgattatatttaagaatcaagcaagcagaccatataacatctaccctcacggaatcactgatgtccgtcctttgtattcaaggagattaccaaaaggtgtaaaacatttgaaggattttccaattctgccaggagaaatattcaaatataaatggacagtgactgtagaagatgggccaactaaatcagatcctcggtgcctgacccgctattactctagtttcgttaatatggagagagatctagcttcaggactcattggccctctcctcatctgctacaaagaatctgtagatcaaagaggaaaccagataatgtcagacaagaggaatgtcatcctgttttctgtatttgatgagaaccgaagctggtacctcacagagaatatacaacgctttctccccaatccagctggagtgcagcttgaggatccagagttccaagcctccaacatcatgcacagcatcaatggctatgtttttgatagtttgcagttgtcagtttgtttgcatgaggtggcatactggtacattctaagcattggagcacagactgacttcctttctgtcttcttctctggatataccttcaaacacaaaatggtctatgaagacacactcaccctattcccattctcaggagaaactgtcttcatgtcgatggaaaacccaggtctatggattctggggtgccacaactcagactttcggaacagaggcatgaccgccttactgaaggtttctagttgtgacaagaacactggtgattattacgaggacagttatgaagatatttcagcatacttgctgagtaaaaacaatgccattgaaccaagaagcttctctcaaaacggcgcgccaggttctcctgctggctcccccacctcaacagaagaggggacaagcgaaagcgctacgcctgagagtggccctggctctgagccagccacctccggctctgaaacccctgcctcgagcccaccagtcttgaaacgccatcaagctgaaataactcgtactactcttcagtcagatcaagaggaaatcgattatgatgataccatatcagttgaaatgaagaaggaagattttgacatttatgatgaggatgaaaatcagagcccccgcagctttcaaaagaaaacacgacactattttattgctgcagtggagaggctctgggattatgggatgagtagctccccacatgttctaagaaacagggctcagagtggcagtgtccctcagttcaagaaagttgttttccaggaatttactgatggctcctttactcagcccttataccgtggagaactaaatgaacatttgggactcctggggccatatataagagcagaagttgaagataatatcatggtaactttcagaaatcaggcctctcgtccctattccttctattctagccttatttcttatgaggaagatcagaggcaaggagcagaacctagaaaaaactttgtcaagcctaatgaaaccaaaacttacttttggaaagtgcaacatcatatggcacccactaaagatgagtttgactgcaaagcctgggcttatttctctgatgttgacctggaaaaagatgtgcactcaggcctgattggaccccttctggtctgccacactaacacactgaaccctgctcatgggagacaagtgacagtacaggaatttgctctgtttttcaccatctttgatgagaccaaaagctggtacttcactgaaaatatggaaagaaactgcaggggcgcgccaggttctcctgctggctcccccacctcaacagaagaggggacaagcgaaagcgctacgcctgagagtggccctggctctgagccagccacctccggctctgaaacccctgcctcgagcgctccctgcaatatccagatggaagatcccacttttaaagagaattatcgcttccatgcaatcaatggctacataatggatacactacctggcttagtaatggctcaggatcaaaggattcgatggtatctgctcagcatgggcagcaatgaaaacatccattctattcatttcagtggacatgtgttcactgtacgaaaaaaagaggagtataaaatggcactgtacaatctctatccaggtgtttttgagacagtggaaatgttaccatccaaagctggaatttggcgggtggaatgccttattggcgagcatctacatgctgggatgagcacactttttctggtgtacagcaataagtgtcagactcccctgggaatggcttctggacacattagagattttcagattacagcttcaggacaatatggacagtgggccccaaagctggccagacttcattattccggatcaatcaatgcctggagcaccaaggagcccttttcttggatcaaggtggatctgttggcaccaatgattattcacggcatcaagacccagggtgcccgtcagaagttctccagcctctacatctctcagtttatcatcatgtatagtcttgatgggaagaagtggcagacttatcgaggaaattccactggaaccttaatggtcttctttggcaatgtggattcatctgggataaaacacaatatttttaaccctccaattattgctcgatacatccgtttgcacccaactcattatagcattcgcagcactcttcgcatggagttgatgggctgtgatttaaatagttgcagcatgccattgggaatggagagtaaagcaatatcagatgcacagattactgcttcatcctactttaccaatatgtttgccacctggtctccttcaaaagctcgacttcacctccaagggaggagtaatgcctggagacctcaggtgaataatccaaaagagtggctgcaagtggacttccagaagacaatgaaagtcacaggagtaactactcagggagtaaaatctctgcttaccagcatgtatgtgaaggagttcctcatctccagcagtcaagatggccatcagtggactctcttttttcagaatggcaaagtaaaggtttttcagggaaatcaagactccttcacacctgtggtgaactctctagacccaccgttactgactcgctaccttcgaattcacccccagagttgggtgcaccagattgccctgaggatggaggttctgggctgcgaggcacaggacctctacggcgcgccacccgggtcgtccccgtcggcgtccaccggaacagggccagggtcatccccgtcagcgtcgactgggacgggacccgggacacccggttcggggactgcatcctcctcgcctggttcgtccaccccgtcaggagccacgggttcgccgggaagcagcccaagcgcatccactggtacagggcctggggcttcaccgggtacttcatccacggggtcaccgggaacgcccggatcggggacggcttcctcatcaccaggatcgtcaacaccctcgggcgcaacgggcagccccggaacccctggttcgggtacggcgtcgtcgagccccggtgcgagcccgggaacaagctcgacaggatcgcctggggcgtcacccggcacgtcgagcacaggcagccccggaacccctggatcgggaaccgcgtcgtcaagcgcctcgagcgaacaaaaactcatctcagaagaggatctgtcacctgcaaccggtcatcatcaccatcaccattga

SEQ ID NO: 1441 - protein, 1801 aa, synthetic construct
  REGION 1..1801: note = Description of Artificial Sequence: Synthetic polypeptide
ATRRYYLGAVELSWDYMQSDLGELPVDARFPPRVPKSFPFNTSVVYKKTLFVEFTDHLFNIAKPRPPWMGLLGPTIQAEVYDTVVITLKNMASHPVSLHAVGVSYWKASEGAEYDDQTSQREKEDDKVFPGGSHTYVWQVLKENGPMASDPLCLTYSYLSHVDLVKDLNSGLIGALLVCREGSLAKEKTQTLHKFILLFAVFDEGKSWHSETKNSLMQDRDAASARAWPKMHTVNGYVNRSLPGLIGCHRKSVYWHVIGMGTTPEVHSIFLEGHTFLVRNHRQASLEISPITFLTAQTLLMDLGQFLLFCHISSHQHDGMEAYVKVDSCPEEPQLRMKNNEEAEDYDDDLTDSEMDVVRFDDDNSPSFIQIRSVAKKHPKTWVHYIAAEEEDWDYAPLVLAPDDRSYKSQYLNNGPQRIGRKYKKVRFMAYTDETFKTREAIQHESGILGPLLYGEVGDTLLIIFKNQASRPYNIYPHGITDVRPLYSRRLPKGVKHLKDFPILPGEIFKYKWTVTVEDGPTKSDPRCLTRYYSSFVNMERDLASGLIGPLLICYKESVDQRGNQIMSDKRNVILFSVFDENRSWYLTENIQRFLPNPAGVQLEDPEFQASNIMHSINGYVFDSLQLSVCLHEVAYWYILSIGAQTDFLSVFFSGYTFKHKMVYEDTLTLFPFSGETVFMSMENPGLWILGCHNSDFRNRGMTALLKVSSCDKNTGDYYEDSYEDISAYLLSKNNAIEPRSFSQNGAPGSPAGSPTSTEEGTSESATPESGPGSEPATSGSETPASSPPVLKRHQAEITRTTLQSDQEEIDYDDTISVEMKKEDFDIYDEDENQSPRSFQKKTRHYFIAAVERLWDYGMSSSPHVLRNRAQSGSVPQFKKVVFQEFTDGSFTQPLYRGELNEHLGLLGPYIRAEVEDNIMVTFRNQASRPYSFYSSLISYEEDQRQGAEPRKNFVKPNETKTYFWKVQHHMAPTKDEFDCKAWAYFSDVDLEKDVHSGLIGPLLVCHTNTLNPAHGRQVTVQEFALFFTIFDETKSWYFTENMERNCRGAPGTPGSGTASSSPGASPGTSSTGSPGASPGTSSTGSPGASPGTSSTGSPGSSPSASTGTGPGTPGSGTASSSPGASPGTSSTGSPGASPGTSSTGSPGASPGTSSTGSPGSSTPSGATGSPGSSTPSGATGSPGASPGTSSTGSPASSAPCNIQMEDPTFKENYRFHAINGYIMDTLPGLVMAQDQRIRWYLLSMGSNENIHSIHFSGHVFTVRKKEEYKMALYNLYPGVFETVEMLPSKAGIWRVECLIGEHLHAGMSTLFLVYSNKCQTPLGMASGHIRDFQITASGQYGQWAPKLARLHYSGSINAWSTKEPFSWIKVDLLAPMIIHGIKTQGARQKFSSLYISQFIIMYSLDGKKWQTYRGNSTGTLMVFFGNVDSSGIKHNIFNPPIIARYIRLHPTHYSIRSTLRMELMGCDLNSCSMPLGMESKAISDAQITASSYFTNMFATWSPSKARLHLQGRSNAWRPQVNNPKEWLQVDFQKTMKVTGVTTQGVKSLLTSMYVKEFLISSSQDGHQWTLFFQNGKVKVFQGNQDSFTPVVNSLDPPLLTRYLRIHPQSWVHQIALRMEVLGCEAQDLYGAPPGSSPSASTGTGPGSSPSASTGTGPGTPGSGTASSSPGSSTPSGATGSPGSSPSASTGTGPGASPGTSSTGSPGTPGSGTASSSPGSSTPSGATGSPGTPGSGTASSSPGASPGTSSTGSPGASPGTSSTGSPGTPGSGTASSSASSEQKLISEEDLSPATGHHHHHH

SEQ ID NO: 1442 - DNA, 5406 bp, synthetic construct
  misc_feature 1..5406: note = Description of Artificial Sequence: Synthetic polynucleotide
  source 1..5406: mol_type = other DNA
gccaccagaagatactacctgggtgcagtggaactgtcatgggactatatgcaaagtgatctcggtgagctgcctgtggacgcaagatttcctcctagagtgccaaaatcttttccattcaacacctcagtcgtgtacaaaaagactctgtttgtagaattcacggatcaccttttcaacatcgctaagccaaggccaccctggatgggtctgctaggtcctaccatccaggctgaggtttatgatacagtggtcattacacttaagaacatggcttcccatcctgtcagtcttcatgctgttggtgtatcctactggaaagcttctgagggagctgaatatgatgatcagaccagtcaaagggagaaagaagatgataaagtcttccctggtggaagccatacatatgtctggcaggtcctgaaagagaatggtccaatggcctctgacccactgtgccttacctactcatatctttctcatgtggacctggtaaaagacttgaattcaggcctcattggagccctactagtatgtagagaagggagtctggccaaggaaaagacacagaccttgcacaaatttatactactttttgctgtatttgatgaagggaaaagttggcactcagaaacaaagaactccttgatgcaggatagggatgctgcatctgctcgggcctggcctaaaatgcacacagtcaatggttatgtaaacaggtctctgccaggtctgattggatgccacaggaaatcagtctattggcatgtgattggaatgggcaccactcctgaagtgcactcaatattcctcgaaggtcacacatttcttgtgaggaaccatcgccaggctagcttggaaatctcgccaataactttccttactgctcaaacactcttgatggaccttggacagtttctactgttttgtcatatctcttcccaccaacatgatggcatggaagcttatgtcaaagtagacagctgtccagaggaaccccaactacgaatgaaaaataatgaagaagcggaagactatgatgatgatcttactgattctgaaatggatgtggtcaggtttgatgatgacaactctccttcctttatccaaattcgctcagttgccaagaagcatcctaaaacttgggtacattacattgctgctgaagaggaggactgggactatgctcccttagtcctcgcccccgatgacagaagttataaaagtcaatatttgaacaatggccctcagcggattggtaggaagtacaaaaaagtccgatttatggcatacacagatgaaacctttaagactcgtgaagctattcagcatgaatcaggaatcttgggacctttactttatggggaagttggagacacactgttgattatatttaagaatcaagcaagcagaccatataacatctaccctcacggaatcactgatgtccgtcctttgtattcaaggagattaccaaaaggtgtaaaacatttgaaggattttccaattctgccaggagaaatattcaaatataaatggacagtgactgtagaagatgggccaactaaatcagatcctcggtgcctgacccgctattactctagtttcgttaatatggagagagatctagcttcaggactcattggccctctcctcatctgctacaaagaatctgtagatcaaagaggaaaccagataatgtcagacaagaggaatgtcatcctgttttctgtatttgatgagaaccgaagctggtacctcacagagaatatacaacgctttctccccaatccagctggagtgcagcttgaggatccagagttccaagcctccaacatcatgcacagcatcaatggctatgtttttgatagtttgcagttgtcagtttgtttgcatgaggtggcatactggtacattctaagcattggagcacagactgacttcctttctgtcttcttctctggatataccttcaaacacaaaatggtctatgaagacacactcaccctattcccattctcaggagaaactgtcttcatgtcgatggaaaacccaggtctatggattctggggtgccacaactcagactttcggaacagaggcatgaccgccttactgaaggtttctagttgtgacaagaacactggtgattattacgaggacagttatgaagatatttcagcatacttgctgagtaaaaacaatgccattgaaccaagaagcttctctcaaaacggcgcgccaggttctcctgctggctcccccacctcaacagaagaggggacaagcgaaagcgctacgcctgagagtggccctggctctgagccagccacctccggctctgaaacccctgcctcgagcccaccagtcttgaaacgccatcaagctgaaataactcgtactactcttcagtcagatcaagaggaaatcgattatgatgataccatatcagttgaaatgaagaaggaagattttgacatttatgatgaggatgaaaatcagagcccccgcagctttcaaaagaaaacacgacactattttattgctgcagtggagaggctctgggattatgggatgagtagctccccacatgttctaagaaacagggctcagagtggcagtgtccctcagttcaagaaagttgttttccaggaatttactgatggctcctttactcagcccttataccgtggagaactaaatgaacatttgggactcctggggccatatataagagcagaagttgaagataatatcatggtaactttcagaaatcaggcctctcgtccctattccttctattctagccttatttcttatgaggaagatcagaggcaaggagcagaacctagaaaaaactttgtcaagcctaatgaaaccaaaacttacttttggaaagtgcaacatcatatggcacccactaaagatgagtttgactgcaaagcctgggcttatttctctgatgttgacctggaaaaagatgtgcactcaggcctgattggaccccttctggtctgccacactaacacactgaaccctgctcatgggagacaagtgacagtacaggaatttgctctgtttttcaccatctttgatgagaccaaaagctggtacttcactgaaaatatggaaagaaactgcaggggcgcgccaggtacacccggatcgggtacagcgtcatcgagccccggtgcgtcacctggtacgtcgagcacggggtcgccaggggcgtcccctgggacgtcctcaacaggctcgcccggtgcgtcacccggcacgtcgtccacgggttcacctggtagctccccttccgcgtccactggcaccgggcctggaactccggggagcggcacagcgagctcgtcgccgggagcatcgcctgggacatcgagcaccgggtcgccaggagcatcgcccggaacatccagcacaggaagccccggcgcgtcgcccgggacatcaagcacaggttccccgggatcgagcacgccgtccggagccactggatcaccagggagctcgacaccttccggcgcaacgggatcgcccggagccagcccgggtacgtcaagcactggctcccctgcctcgagcgctccctgcaatatccagatggaagatcccacttttaaagagaattatcgcttccatgcaatcaatggctacataatggatacactacctggcttagtaatggctcaggatcaaaggattcgatggtatctgctcagcatgggcagcaatgaaaacatccattctattcatttcagtggacatgtgttcactgtacgaaaaaaagaggagtataaaatggcactgtacaatctctatccaggtgtttttgagacagtggaaatgttaccatccaaagctggaatttggcgggtggaatgccttattggcgagcatctacatgctgggatgagcacactttttctggtgtacagcaataagtgtcagactcccctgggaatggcttctggacacattagagattttcagattacagcttcaggacaatatggacagtgggccccaaagctggccagacttcattattccggatcaatcaatgcctggagcaccaaggagcccttttcttggatcaaggtggatctgttggcaccaatgattattcacggcatcaagacccagggtgcccgtcagaagttctccagcctctacatctctcagtttatcatcatgtatagtcttgatgggaagaagtggcagacttatcgaggaaattccactggaaccttaatggtcttctttggcaatgtggattcatctgggataaaacacaatatttttaaccctccaattattgctcgatacatccgtttgcacccaactcattatagcattcgcagcactcttcgcatggagttgatgggctgtgatttaaatagttgcagcatgccattgggaatggagagtaaagcaatatcagatgcacagattactgcttcatcctactttaccaatatgtttgccacctggtctccttcaaaagctcgacttcacctccaagggaggagtaatgcctggagacctcaggtgaataatccaaaagagtggctgcaagtggacttccagaagacaatgaaagtcacaggagtaactactcagggagtaaaatctctgcttaccagcatgtatgtgaaggagttcctcatctccagcagtcaagatggccatcagtggactctcttttttcagaatggcaaagtaaaggtttttcagggaaatcaagactccttcacacctgtggtgaactctctagacccaccgttactgactcgctaccttcgaattcacccccagagttgggtgcaccagattgccctgaggatggaggttctgggctgcgaggcacaggacctctacggcgcgccacccgggtcgtccccgtcggcgtccaccggaacagggccagggtcatccccgtcagcgtcgactgggacgggacccgggacacccggttcggggactgcatcctcctcgcctggttcgtccaccccgtcaggagccacgggttcgccgggaagcagcccaagcgcatccactggtacagggcctggggcttcaccgggtacttcatccacggggtcaccgggaacgcccggatcggggacggcttcctcatcaccaggatcgtcaacaccctcgggcgcaacgggcagccccggaacccctggttcgggtacggcgtcgtcgagccccggtgcgagcccgggaacaagctcgacaggatcgcctggggcgtcacccggcacgtcgagcacaggcagccccggaacccctggatcgggaaccgcgtcgtcaagcgcctcgagcgaacaaaaactcatctcagaagaggatctgtcacctgcaaccggtcatcatcaccatcaccattga

SEQ ID NO: 1443 - protein, 1945 aa, synthetic construct
  REGION 1..1945: note = Description of Artificial Sequence: Synthetic polypeptide
ATRRYYLGAVELSWDYMQSDLGELPVDARFPPRVPKSFPFNTSVVYKKTLFVEFTDHLFNIAKPRPPWMGLLGPTIQAEVYDTVVITLKNMASHPVSLHAVGVSYWKASEGAEYDDQTSQREKEDDKVFPGGSHTYVWQVLKENGPMASDPLCLTYSYLSHVDLVKDLNSGLIGALLVCREGSLAKEKTQTLHKFILLFAVFDEGKSWHSETKNSLMQDRDAASARAWPKMHTVNGYVNRSLPGLIGCHRKSVYWHVIGMGTTPEVHSIFLEGHTFLVRNHRQASLEISPITFLTAQTLLMDLGQFLLFCHISSHQHDGMEAYVKVDSCPEEPQLRMKNNEEAEDYDDDLTDSEMDVVRFDDDNSPSFIQIRSVAKKHPKTWVHYIAAEEEDWDYAPLVLAPDDRSYKSQYLNNGPQRIGRKYKKVRFMAYTDETFKTREAIQHESGILGPLLYGEVGDTLLIIFKNQASRPYNIYPHGITDVRPLYSRRLPKGVKHLKDFPILPGEIFKYKWTVTVEDGPTKSDPRCLTRYYSSFVNMERDLASGLIGPLLICYKESVDQRGNQIMSDKRNVILFSVFDENRSWYLTENIQRFLPNPAGVQLEDPEFQASNIMHSINGYVFDSLQLSVCLHEVAYWYILSIGAQTDFLSVFFSGYTFKHKMVYEDTLTLFPFSGETVFMSMENPGLWILGCHNSDFRNRGMTALLKVSSCDKNTGDYYEDSYEDISAYLLSKNNAIEPRSFSQNGAPGSPAGSPTSTEEGTSESATPESGPGSEPATSGSETPASSPPVLKRHQAEITRTTLQSDQEEIDYDDTISVEMKKEDFDIYDEDENQSPRSFQKKTRHYFIAAVERLWDYGMSSSPHVLRNRAQSGSVPQFKKVVFQEFTDGSFTQPLYRGELNEHLGLLGPYIRAEVEDNIMVTFRNQASRPYSFYSSLISYEEDQRQGAEPRKNFVKPNETKTYFWKVQHHMAPTKDEFDCKAWAYFSDVDLEKDVHSGLIGPLLVCHTNTLNPAHGRQVTVQEFALFFTIFDETKSWYFTENMERNCRGAPGTPGSGTASSSPGSSTPSGATGSPGSSTPSGATGSPGSSTPSGATGSPGSSPSASTGTGPGASPGTSSTGSPGASPGTSSTGSPGTPGSGTASSSPGASPGTSSTGSPGASPGTSSTGSPGASPGTSSTGSPGASPGTSSTGSPGTPGSGTASSSPGSSTPSGATGSPGTPGSGTASSSPGSSTPSGATGSPGTPGSGTASSSPGSSTPSGATGSPGSSTPSGATGSPGSSPSASTGTGPGSSPSASTGTGPGASPGTSSTGSPGTPGSGTASSSPGSSTPSGATGSPASSAPCNIQMEDPTFKENYRFHAINGYIMDTLPGLVMAQDQRIRWYLLSMGSNENIHSIHFSGHVFTVRKKEEYKMALYNLYPGVFETVEMLPSKAGIWRVECLIGEHLHAGMSTLFLVYSNKCQTPLGMASGHIRDFQITASGQYGQWAPKLARLHYSGSINAWSTKEPFSWIKVDLLAPMIIHGIKTQGARQKFSSLYISQFIIMYSLDGKKWQTYRGNSTGTLMVFFGNVDSSGIKHNIFNPPIIARYIRLHPTHYSIRSTLRMELMGCDLNSCSMPLGMESKAISDAQITASSYFTNMFATWSPSKARLHLQGRSNAWRPQVNNPKEWLQVDFQKTMKVTGVTTQGVKSLLTSMYVKEFLISSSQDGHQWTLFFQNGKVKVFQGNQDSFTPVVNSLDPPLLTRYLRIHPQSWVHQIALRMEVLGCEAQDLYGAPPGSSPSASTGTGPGSSPSASTGTGPGTPGSGTASSSPGSSTPSGATGSPGSSPSASTGTGPGASPGTSSTGSPGTPGSGTASSSPGSSTPSGATGSPGTPGSGTASSSPGASPGTSSTGSPGASPGTSSTGSPGTPGSGTASSSASSEQKLISEEDLSPATGHHHHHH

SEQ ID NO: 1444 - DNA, 5838 bp, synthetic construct
  misc_feature 1..5838: note = Description of Artificial Sequence: Synthetic polynucleotide
  source 1..5838: mol_type = other DNA
gccaccagaagatactacctgggtgcagtggaactgtcatgggactatatgcaaagtgatctcggtgagctgcctgtggacgcaagatttcctcctagagtgccaaaatcttttccattcaacacctcagtcgtgtacaaaaagactctgtttgtagaattcacggatcaccttttcaacatcgctaagccaaggccaccctggatgggtctgctaggtcctaccatccaggctgaggtttatgatacagtggtcattacacttaagaacatggcttcccatcctgtcagtcttcatgctgttggtgtatcctactggaaagcttctgagggagctgaatatgatgatcagaccagtcaaagggagaaagaagatgataaagtcttccctggtggaagccatacatatgtctggcaggtcctgaaagagaatggtccaatggcctctgacccactgtgccttacctactcatatctttctcatgtggacctggtaaaagacttgaattcaggcctcattggagccctactagtatgtagagaagggagtctggccaaggaaaagacacagaccttgcacaaatttatactactttttgctgtatttgatgaagggaaaagttggcactcagaaacaaagaactccttgatgcaggatagggatgctgcatctgctcgggcctggcctaaaatgcacacagtcaatggttatgtaaacaggtctctgccaggtctgattggatgccacaggaaatcagtctattggcatgtgattggaatgggcaccactcctgaagtgcactcaatattcctcgaaggtcacacatttcttgtgaggaaccatcgccaggctagcttggaaatctcgccaataactttccttactgctcaaacactcttgatggaccttggacagtttctactgttttgtcatatctcttcccaccaacatgatggcatggaagcttatgtcaaagtagacagctgtccagaggaaccccaactacgaatgaaaaataatgaagaagcggaagactatgatgatgatcttactgattctgaaatggatgtggtcaggtttgatgatgacaactctccttcctttatccaaattcgctcagttgccaagaagcatcctaaaacttgggtacattacattgctgctgaagaggaggactgggactatgctcccttagtcctcgcccccgatgacagaagttataaaagtcaatatttgaacaatggccctcagcggattggtaggaagtacaaaaaagtccgatttatggcatacacagatgaaacctttaagactcgtgaagctattcagcatgaatcaggaatcttgggacctttactttatggggaagttggagacacactgttgattatatttaagaatcaagcaagcagaccatataacatctaccctcacggaatcactgatgtccgtcctttgtattcaaggagattaccaaaaggtgtaaaacatttgaaggattttccaattctgccaggagaaatattcaaatataaatggacagtgactgtagaagatgggccaactaaatcagatcctcggtgcctgacccgctattactctagtttcgttaatatggagagagatctagcttcaggactcattggccctctcctcatctgctacaaagaatctgtagatcaaagaggaaaccagataatgtcagacaagaggaatgtcatcctgttttctgtatttgatgagaaccgaagctggtacctcacagagaatatacaacgctttctccccaatccagctggagtgcagcttgaggatccagagttccaagcctccaacatcatgcacagcatcaatggctatgtttttgatagtttgcagttgtcagtttgtttgcatgaggtggcatactggtacattctaagcattggagcacagactgacttcctttctgtcttcttctctggatataccttcaaacacaaaatggtctatgaagacacactcaccctattcccattctcaggagaaactgtcttcatgtcgatggaaaacccaggtctatggattctggggtgccacaactcagactttcggaacagaggcatgaccgccttactgaaggtttctagttgtgacaagaacactggtgattattacgaggacagttatgaagatatttcagcatacttgctgagtaaaaacaatgccattgaaccaagaagcttctctcaaaacggcgcgccaggttctcctgctggctcccccacctcaacagaagaggggacaagcgaaagcgctacgcctgagagtggccctggctctgagccagccacctccggctctgaaacccctgcctcgagcccaccagtcttgaaacgccatcaagctgaaataactcgtactactcttcagtcagatcaagaggaaatcgattatgatgataccatatcagttgaaatgaagaaggaagattttgacatttatgatgaggatgaaaatcagagcccccgcagctttcaaaagaaaacacgacactattttattgctgcagtggagaggctctgggattatgggatgagtagctccccacatgttctaagaaacagggctcagagtggcagtgtccctcagttcaagaaagttgttttccaggaatttactgatggctcctttactcagcccttataccgtggagaactaaatgaacatttgggactcctggggccatatataagagcagaagttgaagataatatcatggtaactttcagaaatcaggcctctcgtccctattccttctattctagccttatttcttatgaggaagatcagaggcaaggagcagaacctagaaaaaactttgtcaagcctaatgaaaccaaaacttacttttggaaagtgcaacatcatatggcacccactaaagatgagtttgactgcaaagcctgggcttatttctctgatgttgacctggaaaaagatgtgcactcaggcctgattggaccccttctggtctgccacactaacacactgaaccctgctcatgggagacaagtgacagtacaggaatttgctctgtttttcaccatctttgatgagaccaaaagctggtacttcactgaaaatatggaaagaaactgcaggggcgcgccaggtacgcccgggtcgggaacagcgtcctcaagcccgggtagctcgacgccgtcaggagccacagggtcgccgggatcgtcgactccatcaggcgcaacgggatcgcctggatcaagcactccatccggagcgacgggaagcccagggagctccccgtccgcatcgactgggacgggacctggagcaagccccggtacgtcgtcaacaggttcgcctggtgcctcgcctggcacgtccagcacggggagccccggaacgccgggttccggaaccgcatcctcctcaccaggtgcctcaccgggcacctcatcaacgggatcaccaggggcttcaccgggaacgagctcgacgggttcaccgggagcgtccccggggacttcgtcgacaggtagcccaggggcaagccccggtacatcgtcaacgggttccccagggacaccggggagcggtactgcatcgtcctcacccggttcctcgacacccagcggagccacgggttcgcccggtactccggggtccggaacggccagcagctcacccggttcctcgacgccatcaggtgccacgggctcgcctggaacgccaggctcgggcactgcgagcagcagccctggatcatcaacgcctagcggagcgaccggctcccctggatcgtcaactccctcgggcgcgactgggagcccaggaagctcaccgtcggcctcgacgggaacagggcctggttcgagcccctcagcttcaacaggaacaggtccaggcgcgtcgccaggtacatcatcgacgggttcgcctgggacccctgggtccggtactgcctcatcatcgcccggatcgtccaccccctcgggagcgacaggttcgcctgcctcgagcgctccctgcaatatccagatggaagatcccacttttaaagagaattatcgcttccatgcaatcaatggctacataatggatacactacctggcttagtaatggctcaggatcaaaggattcgatggtatctgctcagcatgggcagcaatgaaaacatccattctattcatttcagtggacatgtgttcactgtacgaaaaaaagaggagtataaaatggcactgtacaatctctatccaggtgtttttgagacagtggaaatgttaccatccaaagctggaatttggcgggtggaatgccttattggcgagcatctacatgctgggatgagcacactttttctggtgtacagcaataagtgtcagactcccctgggaatggcttctggacacattagagattttcagattacagcttcaggacaatatggacagtgggccccaaagctggccagacttcattattccggatcaatcaatgcctggagcaccaaggagcccttttcttggatcaaggtggatctgttggcaccaatgattattcacggcatcaagacccagggtgcccgtcagaagttctccagcctctacatctctcagtttatcatcatgtatagtcttgatgggaagaagtggcagacttatcgaggaaattccactggaaccttaatggtcttctttggcaatgtggattcatctgggataaaacacaatatttttaaccctccaattattgctcgatacatccgtttgcacccaactcattatagcattcgcagcactcttcgcatggagttgatgggctgtgatttaaatagttgcagcatgccattgggaatggagagtaaagcaatatcagatgcacagattactgcttcatcctactttaccaatatgtttgccacctggtctccttcaaaagctcgacttcacctccaagggaggagtaatgcctggagacctcaggtgaataatccaaaagagtggctgcaagtggacttccagaagacaatgaaagtcacaggagtaactactcagggagtaaaatctctgcttaccagcatgtatgtgaaggagttcctcatctccagcagtcaagatggccatcagtggactctcttttttcagaatggcaaagtaaaggtttttcagggaaatcaagactccttcacacctgtggtgaactctctagacccaccgttactgactcgctaccttcgaattcacccccagagttgggtgcaccagattgccctgaggatggaggttctgggctgcgaggcacaggacctctacggcgcgccacccgggtcgtccccgtcggcgtccaccggaacagggccagggtcatccccgtcagcgtcgactgggacgggacccgggacacccggttcggggactgcatcctcctcgcctggttcgtccaccccgtcaggagccacgggttcgccgggaagcagcccaagcgcatccactggtacagggcctggggcttcaccgggtacttcatccacggggtcaccgggaacgcccggatcggggacggcttcctcatcaccaggatcgtcaacaccctcgggcgcaacgggcagccccggaacccctggttcgggtacggcgtcgtcgagccccggtgcgagcccgggaacaagctcgacaggatcgcctggggcgtcacccggcacgtcgagcacaggcagccccggaacccctggatcgggaaccgcgtcgtcaagcgcctcgagcgaacaaaaactcatctcagaagaggatctgtcacctgcaaccggtcatcatcaccatcaccattga

SEQ ID NO: 1445 - protein, 1801 aa, synthetic construct
  REGION 1..1801: note = Description of Artificial Sequence: Synthetic polypeptide
ATRRYYLGAVELSWDYMQSDLGELPVDARFPPRVPKSFPFNTSVVYKKTLFVEFTDHLFNIAKPRPPWMGLLGPTIQAEVYDTVVITLKNMASHPVSLHAVGVSYWKASEGAEYDDQTSQREKEDDKVFPGGSHTYVWQVLKENGPMASDPLCLTYSYLSHVDLVKDLNSGLIGALLVCREGSLAKEKTQTLHKFILLFAVFDEGKSWHSETKNSLMQDRDAASARAWPKMHTVNGYVNRSLPGLIGCHRKSVYWHVIGMGTTPEVHSIFLEGHTFLVRNHRQASLEISPITFLTAQTLLMDLGQFLLFCHISSHQHDGMEAYVKVDSCPEEPQLRMKNNEEAEDYDDDLTDSEMDVVRFDDDNSPSFIQIRSVAKKHPKTWVHYIAAEEEDWDYAPLVLAPDDRSYKSQYLNNGPQRIGRKYKKVRFMAYTDETFKTREAIQHESGILGPLLYGEVGDTLLIIFKNQASRPYNIYPHGITDVRPLYSRRLPKGVKHLKDFPILPGEIFKYKWTVTVEDGPTKSDPRCLTRYYSSFVNMERDLASGLIGPLLICYKESVDQRGNQIMSDKRNVILFSVFDENRSWYLTENIQRFLPNPAGVQLEDPEFQASNIMHSINGYVFDSLQLSVCLHEVAYWYILSIGAQTDFLSVFFSGYTFKHKMVYEDTLTLFPFSGETVFMSMENPGLWILGCHNSDFRNRGMTALLKVSSCDKNTGDYYEDSYEDISAYLLSKNNAIEPRSFSQNGAPGTPGSGTASSSPGSSTPSGATGSPGASPGTSSTGSPGTPGSGTASSSPGSSTPSGATGSPGSSPSASTGTGPGSSPSASTGTGPGSSTPSGATGSPGSSTPSGATGSPGASPGTSSTGSPGASPGTSSTGSPGASPGTSSTGSPASSPPVLKRHQAEITRTTLQSDQEEIDYDDTISVEMKKEDFDIYDEDENQSPRSFQKKTRHYFIAAVERLWDYGMSSSPHVLRNRAQSGSVPQFKKVVFQEFTDGSFTQPLYRGELNEHLGLLGPYIRAEVEDNIMVTFRNQASRPYSFYSSLISYEEDQRQGAEPRKNFVKPNETKTYFWKVQHHMAPTKDEFDCKAWAYFSDVDLEKDVHSGLIGPLLVCHTNTLNPAHGRQVTVQEFALFFTIFDETKSWYFTENMERNCRGAPGSPAGSPTSTEEGTSESATPESGPGSEPATSGSETPASSAPCNIQMEDPTFKENYRFHAINGYIMDTLPGLVMAQDQRIRWYLLSMGSNENIHSIHFSGHVFTVRKKEEYKMALYNLYPGVFETVEMLPSKAGIWRVECLIGEHLHAGMSTLFLVYSNKCQTPLGMASGHIRDFQITASGQYGQWAPKLARLHYSGSINAWSTKEPFSWIKVDLLAPMIIHGIKTQGARQKFSSLYISQFIIMYSLDGKKWQTYRGNSTGTLMVFFGNVDSSGIKHNIFNPPIIARYIRLHPTHYSIRSTLRMELMGCDLNSCSMPLGMESKAISDAQITASSYFTNMFATWSPSKARLHLQGRSNAWRPQVNNPKEWLQVDFQKTMKVTGVTTQGVKSLLTSMYVKEFLISSSQDGHQWTLFFQNGKVKVFQGNQDSFTPVVNSLDPPLLTRYLRIHPQSWVHQIALRMEVLGCEAQDLYGAPPGSSPSASTGTGPGSSPSASTGTGPGTPGSGTASSSPGSSTPSGATGSPGSSPSASTGTGPGASPGTSSTGSPGTPGSGTASSSPGSSTPSGATGSPGTPGSGTASSSPGASPGTSSTGSPGASPGTSSTGSPGTPGSGTASSSASSEQKLISEEDLSPATGHHHHHH

SEQ ID NO: 1446 - DNA, 5406 bp, synthetic construct
  misc_feature 1..5406: note = Description of Artificial Sequence: Synthetic polynucleotide
  source 1..5406: mol_type = other DNA
gccaccagaagatactacctgggtgcagtggaactgtcatgggactatatgcaaagtgatctcggtgagctgcctgtggacgcaagatttcctcctagagtgccaaaatcttttccattcaacacctcagtcgtgtacaaaaagactctgtttgtagaattcacggatcaccttttcaacatcgctaagccaaggccaccctggatgggtctgctaggtcctaccatccaggctgaggtttatgatacagtggtcattacacttaagaacatggcttcccatcctgtcagtcttcatgctgttggtgtatcctactggaaagcttctgagggagctgaatatgatgatcagaccagtcaaagggagaaagaagatgataaagtcttccctggtggaagccatacatatgtctggcaggtcctgaaagagaatggtccaatggcctctgacccactgtgccttacctactcatatctttctcatgtggacctggtaaaagacttgaattcaggcctcattggagccctactagtatgtagagaagggagtctggccaaggaaaagacacagaccttgcacaaatttatactactttttgctgtatttgatgaagggaaaagttggcactcagaaacaaagaactccttgatgcaggatagggatgctgcatctgctcgggcctggcctaaaatgcacacagtcaatggttatgtaaacaggtctctgccaggtctgattggatgccacaggaaatcagtctattggcatgtgattggaatgggcaccactcctgaagtgcactcaatattcctcgaaggtcacacatttcttgtgaggaaccatcgccaggctagcttggaaatctcgccaataactttccttactgctcaaacactcttgatggaccttggacagtttctactgttttgtcatatctcttcccaccaacatgatggcatggaagcttatgtcaaagtagacagctgtccagaggaaccccaactacgaatgaaaaataatgaagaagcggaagactatgatgatgatcttactgattctgaaatggatgtggtcaggtttgatgatgacaactctccttcctttatccaaattcgctcagttgccaagaagcatcctaaaacttgggtacattacattgctgctgaagaggaggactgggactatgctcccttagtcctcgcccccgatgacagaagttataaaagtcaatatttgaacaatggccctcagcggattggtaggaagtacaaaaaagtccgatttatggcatacacagatgaaacctttaagactcgtgaagctattcagcatgaatcaggaatcttgggacctttactttatggggaagttggagacacactgttgattatatttaagaatcaagcaagcagaccatataacatctaccctcacggaatcactgatgtccgtcctttgtattcaaggagattaccaaaaggtgtaaaacatttgaaggattttccaattctgccaggagaaatattcaaatataaatggacagtgactgtagaagatgggccaactaaatcagatcctcggtgcctgacccgctattactctagtttcgttaatatggagagagatctagcttcaggactcattggccctctcctcatctgctacaaagaatctgtagatcaaagaggaaaccagataatgtcagacaagaggaatgtcatcctgttttctgtatttgatgagaaccgaagctggtacctcacagagaatatacaacgctttctccccaatccagctggagtgcagcttgaggatccagagttccaagcctccaacatcatgcacagcatcaatggctatgtttttgatagtttgcagttgtcagtttgtttgcatgaggtggcatactggtacattctaagcattggagcacagactgacttcctttctgtcttcttctctggatataccttcaaacacaaaatggtctatgaagacacactcaccctattcccattctcaggagaaactgtcttcatgtcgatggaaaacccaggtctatggattctggggtgccacaactcagactttcggaacagaggcatgaccgccttactgaaggtttctagttgtgacaagaacactggtgattattacgaggacagttatgaagatatttcagcatacttgctgagtaaaaacaatgccattgaaccaagaagcttctctcaaaacggcgcgccaggtacaccgggcagcggcacggcttcgtcgtcacccggctcgtccacaccgtcgggagctacgggaagcccaggagcgtcaccgggaacgtcgtcaacggggtcaccgggtacgccaggtagcggcacggccagcagctcgccaggttcatcgaccccgtcgggagcgactgggtcgcccggatcaagcccgtcagcttccactggaacaggacccgggtcgtcgccgtcagcctcaacggggacaggacctggttcatcgacgccgtcaggggcgacaggctcgcccggatcgtcaacaccctcgggggcaacggggagccctggtgcgtcgcctggaacctcatccaccggaagcccgggggcctcgccgggtacgagctccacgggatcgcccggagcgtcccccggaacttcaagcacagggagccctgcctcgagcccaccagtcttgaaacgccatcaagctgaaataactcgtactactcttcagtcagatcaagaggaaatcgattatgatgataccatatcagttgaaatgaagaaggaagattttgacatttatgatgaggatgaaaatcagagcccccgcagctttcaaaagaaaacacgacactattttattgctgcagtggagaggctctgggattatgggatgagtagctccccacatgttctaagaaacagggctcagagtggcagtgtccctcagttcaagaaagttgttttccaggaatttactgatggctcctttactcagcccttataccgtggagaactaaatgaacatttgggactcctggggccatatataagagcagaagttgaagataatatcatggtaactttcagaaatcaggcctctcgtccctattccttctattctagccttatttcttatgaggaagatcagaggcaaggagcagaacctagaaaaaactttgtcaagcctaatgaaaccaaaacttacttttggaaagtgcaacatcatatggcacccactaaagatgagtttgactgcaaagcctgggcttatttctctgatgttgacctggaaaaagatgtgcactcaggcctgattggaccccttctggtctgccacactaacacactgaaccctgctcatgggagacaagtgacagtacaggaatttgctctgtttttcaccatctttgatgagaccaaaagctggtacttcactgaaaatatggaaagaaactgcaggggcgcgccaggttctcctgctggctcccccacctcaacagaagaggggacaagcgaaagcgctacgcctgagagtggccctggctctgagccagccacctccggctctgaaacccctgcctcgagcgctccctgcaatatccagatggaagatcccacttttaaagagaattatcgcttccatgcaatcaatggctacataatggatacactacctggcttagtaatggctcaggatcaaaggattcgatggtatctgctcagcatgggcagcaatgaaaacatccattctattcatttcagtggacatgtgttcactgtacgaaaaaaagaggagtataaaatggcactgtacaatctctatccaggtgtttttgagacagtggaaatgttaccatccaaagctggaatttggcgggtggaatgccttattggcgagcatctacatgctgggatgagcacactttttctggtgtacagcaataagtgtcagactcccctgggaatggcttctggacacattagagattttcagattacagcttcaggacaatatggacagtgggccccaaagctggccagacttcattattccggatcaatcaatgcctggagcaccaaggagcccttttcttggatcaaggtggatctgttggcaccaatgattattcacggcatcaagacccagggtgcccgtcagaagttctccagcctctacatctctcagtttatcatcatgtatagtcttgatgggaagaagtggcagacttatcgaggaaattccactggaaccttaatggtcttctttggcaatgtggattcatctgggataaaacacaatatttttaaccctccaattattgctcgatacatccgtttgcacccaactcattatagcattcgcagcactcttcgcatggagttgatgggctgtgatttaaatagttgcagcatgccattgggaatggagagtaaagcaatatcagatgcacagattactgcttcatcctactttaccaatatgtttgccacctggtctccttcaaaagctcgacttcacctccaagggaggagtaatgcctggagacctcaggtgaataatccaaaagagtggctgcaagtggacttccagaagacaatgaaagtcacaggagtaactactcagggagtaaaatctctgcttaccagcatgtatgtgaaggagttcctcatctccagcagtcaagatggccatcagtggactctcttttttcagaatggcaaagtaaaggtttttcagggaaatcaagactccttcacacctgtggtgaactctctagacccaccgttactgactcgctaccttcgaattcacccccagagttgggtgcaccagattgccctgaggatggaggttctgggctgcgaggcacaggacctctacggcgcgccacccgggtcgtccccgtcggcgtccaccggaacagggccagggtcatccccgtcagcgtcgactgggacgggacccgggacacccggttcggggactgcatcctcctcgcctggttcgtccaccccgtcaggagccacgggttcgccgggaagcagcccaagcgcatccactggtacagggcctggggcttcaccgggtacttcatccacggggtcaccgggaacgcccggatcggggacggcttcctcatcaccaggatcgtcaacaccctcgggcgcaacgggcagccccggaacccctggttcgggtacggcgtcgtcgagccccggtgcgagcccgggaacaagctcgacaggatcgcctggggcgtcacccggcacgtcgagcacaggcagccccggaacccctggatcgggaaccgcgtcgtcaagcgcctcgagcgaacaaaaactcatctcagaagaggatctgtcacctgcaaccggtcatcatcaccatcaccattga

SEQ ID NO: 1447 - protein, 1909 aa, synthetic construct
  REGION 1..1909: note = Description of Artificial Sequence: Synthetic polypeptide
ATRRYYLGAVELSWDYMQSDLGELPVDARFPPRVPKSFPFNTSVVYKKTLFVEFTDHLFNIAKPRPPWMGLLGPTIQAEVYDTVVITLKNMASHPVSLHAVGVSYWKASEGAEYDDQTSQREKEDDKVFPGGSHTYVWQVLKENGPMASDPLCLTYSYLSHVDLVKDLNSGLIGALLVCREGSLAKEKTQTLHKFILLFAVFDEGKSWHSETKNSLMQDRDAASARAWPKMHTVNGYVNRSLPGLIGCHRKSVYWHVIGMGTTPEVHSIFLEGHTFLVRNHRQASLEISPITFLTAQTLLMDLGQFLLFCHISSHQHDGMEAYVKVDSCPEEPQLRMKNNEEAEDYDDDLTDSEMDVVRFDDDNSPSFIQIRSVAKKHPKTWVHYIAAEEEDWDYAPLVLAPDDRSYKSQYLNNGPQRIGRKYKKVRFMAYTDETFKTREAIQHESGILGPLLYGEVGDTLLIIFKNQASRPYNIYPHGITDVRPLYSRRLPKGVKHLKDFPILPGEIFKYKWTVTVEDGPTKSDPRCLTRYYSSFVNMERDLASGLIGPLLICYKESVDQRGNQIMSDKRNVILFSVFDENRSWYLTENIQRFLPNPAGVQLEDPEFQASNIMHSINGYVFDSLQLSVCLHEVAYWYILSIGAQTDFLSVFFSGYTFKHKMVYEDTLTLFPFSGETVFMSMENPGLWILGCHNSDFRNRGMTALLKVSSCDKNTGDYYEDSYEDISAYLLSKNNAIEPRSFSQNGAPGTPGSGTASSSPGSSTPSGATGSPGASPGTSSTGSPGTPGSGTASSSPGSSTPSGATGSPGSSPSASTGTGPGSSPSASTGTGPGSSTPSGATGSPGSSTPSGATGSPGASPGTSSTGSPGASPGTSSTGSPGASPGTSSTGSPASSPPVLKRHQAEITRTTLQSDQEEIDYDDTISVEMKKEDFDIYDEDENQSPRSFQKKTRHYFIAAVERLWDYGMSSSPHVLRNRAQSGSVPQFKKVVFQEFTDGSFTQPLYRGELNEHLGLLGPYIRAEVEDNIMVTFRNQASRPYSFYSSLISYEEDQRQGAEPRKNFVKPNETKTYFWKVQHHMAPTKDEFDCKAWAYFSDVDLEKDVHSGLIGPLLVCHTNTLNPAHGRQVTVQEFALFFTIFDETKSWYFTENMERNCRGAPGTPGSGTASSSPGASPGTSSTGSPGASPGTSSTGSPGASPGTSSTGSPGSSPSASTGTGPGTPGSGTASSSPGASPGTSSTGSPGASPGTSSTGSPGASPGTSSTGSPGSSTPSGATGSPGSSTPSGATGSPGASPGTSSTGSPASSAPCNIQMEDPTFKENYRFHAINGYIMDTLPGLVMAQDQRIRWYLLSMGSNENIHSIHFSGHVFTVRKKEEYKMALYNLYPGVFETVEMLPSKAGIWRVECLIGEHLHAGMSTLFLVYSNKCQTPLGMASGHIRDFQITASGQYGQWAPKLARLHYSGSINAWSTKEPFSWIKVDLLAPMIIHGIKTQGARQKFSSLYISQFIIMYSLDGKKWQTYRGNSTGTLMVFFGNVDSSGIKHNIFNPPIIARYIRLHPTHYSIRSTLRMELMGCDLNSCSMPLGMESKAISDAQITASSYFTNMFATWSPSKARLHLQGRSNAWRPQVNNPKEWLQVDFQKTMKVTGVTTQGVKSLLTSMYVKEFLISSSQDGHQWTLFFQNGKVKVFQGNQDSFTPVVNSLDPPLLTRYLRIHPQSWVHQIALRMEVLGCEAQDLYGAPPGSSPSASTGTGPGSSPSASTGTGPGTPGSGTASSSPGSSTPSGATGSPGSSPSASTGTGPGASPGTSSTGSPGTPGSGTASSSPGSSTPSGATGSPGTPGSGTASSSPGASPGTSSTGSPGASPGTSSTGSPGTPGSGTASSSASSEQKLISEEDLSPATGHHHHHH

SEQ ID NO: 1448 - DNA, 5730 bp, synthetic construct
  misc_feature 1..5730: note = Description of Artificial Sequence: Synthetic polynucleotide
  source 1..5730: mol_type = other DNA
gccaccagaagatactacctgggtgcagtggaactgtcatgggactatatgcaaagtgatctcggtgagctgcctgtggacgcaagatttcctcctagagtgccaaaatcttttccattcaacacctcagtcgtgtacaaaaagactctgtttgtagaattcacggatcaccttttcaacatcgctaagccaaggccaccctggatgggtctgctaggtcctaccatccaggctgaggtttatgatacagtggtcattacacttaagaacatggcttcccatcctgtcagtcttcatgctgttggtgtatcctactggaaagcttctgagggagctgaatatgatgatcagaccagtcaaagggagaaagaagatgataaagtcttccctggtggaagccatacatatgtctggcaggtcctgaaagagaatggtccaatggcctctgacccactgtgccttacctactcatatctttctcatgtggacctggtaaaagacttgaattcaggcctcattggagccctactagtatgtagagaagggagtctggccaaggaaaagacacagaccttgcacaaatttatactactttttgctgtatttgatgaagggaaaagttggcactcagaaacaaagaactccttgatgcaggatagggatgctgcatctgctcgggcctggcctaaaatgcacacagtcaatggttatgtaaacaggtctctgccaggtctgattggatgccacaggaaatcagtctattggcatgtgattggaatgggcaccactcctgaagtgcactcaatattcctcgaaggtcacacatttcttgtgaggaaccatcgccaggctagcttggaaatctcgccaataactttccttactgctcaaacactcttgatggaccttggacagtttctactgttttgtcatatctcttcccaccaacatgatggcatggaagcttatgtcaaagtagacagctgtccagaggaaccccaactacgaatgaaaaataatgaagaagcggaagactatgatgatgatcttactgattctgaaatggatgtggtcaggtttgatgatgacaactctccttcctttatccaaattcgctcagttgccaagaagcatcctaaaacttgggtacattacattgctgctgaagaggaggactgggactatgctcccttagtcctcgcccccgatgacagaagttataaaagtcaatatttgaacaatggccctcagcggattggtaggaagtacaaaaaagtccgatttatggcatacacagatgaaacctttaagactcgtgaagctattcagcatgaatcaggaatcttgggacctttactttatggggaagttggagacacactgttgattatatttaagaatcaagcaagcagaccatataacatctaccctcacggaatcactgatgtccgtcctttgtattcaaggagattaccaaaaggtgtaaaacatttgaaggattttccaattctgccaggagaaatattcaaatataaatggacagtgactgtagaagatgggccaactaaatcagatcctcggtgcctgacccgctattactctagtttcgttaatatggagagagatctagcttcaggactcattggccctctcctcatctgctacaaagaatctgtagatcaaagaggaaaccagataatgtcagacaagaggaatgtcatcctgttttctgtatttgatgagaaccgaagctggtacctcacagagaatatacaacgctttctccccaatccagctggagtgcagcttgaggatccagagttccaagcctccaacatcatgcacagcatcaatggctatgtttttgatagtttgcagttgtcagtttgtttgcatgaggtggcatactggtacattctaagcattggagcacagactgacttcctttctgtcttcttctctggatataccttcaaacacaaaatggtctatgaagacacactcaccctattcccattctcaggagaaactgtcttcatgtcgatggaaaacccaggtctatggattctggggtgccacaactcagactttcggaacagaggcatgaccgccttactgaaggtttctagttgtgacaagaacactggtgattattacgaggacagttatgaagatatttcagcatacttgctgagtaaaaacaatgccattgaaccaagaagcttctctcaaaacggcgcgccaggtacaccgggcagcggcacggcttcgtcgtcacccggctcgtccacaccgtcgggagctacgggaagcccaggagcgtcaccgggaacgtcgtcaacggggtcaccgggtacgccaggtagcggcacggccagcagctcgccaggttcatcgaccccgtcgggagcgactgggtcgcccggatcaagcccgtcagcttccactggaacaggacccgggtcgtcgccgtcagcctcaacggggacaggacctggttcatcgacgccgtcaggggcgacaggctcgcccggatcgtcaacaccctcgggggcaacggggagccctggtgcgtcgcctggaacctcatccaccggaagcccgggggcctcgccgggtacgagctccacgggatcgcccggagcgtcccccggaacttcaagcacagggagccctgcctcgagcccaccagtcttgaaacgccatcaagctgaaataactcgtactactcttcagtcagatcaagaggaaatcgattatgatgataccatatcagttgaaatgaagaaggaagattttgacatttatgatgaggatgaaaatcagagcccccgcagctttcaaaagaaaacacgacactattttattgctgcagtggagaggctctgggattatgggatgagtagctccccacatgttctaagaaacagggctcagagtggcagtgtccctcagttcaagaaagttgttttccaggaatttactgatggctcctttactcagcccttataccgtggagaactaaatgaacatttgggactcctggggccatatataagagcagaagttgaagataatatcatggtaactttcagaaatcaggcctctcgtccctattccttctattctagccttatttcttatgaggaagatcagaggcaaggagcagaacctagaaaaaactttgtcaagcctaatgaaaccaaaacttacttttggaaagtgcaacatcatatggcacccactaaagatgagtttgactgcaaagcctgggcttatttctctgatgttgacctggaaaaagatgtgcactcaggcctgattggaccccttctggtctgccacactaacacactgaaccctgctcatgggagacaagtgacagtacaggaatttgctctgtttttcaccatctttgatgagaccaaaagctggtacttcactgaaaatatggaaagaaactgcaggggcgcgccaggtacacccggatcgggtacagcgtcatcgagccccggtgcgtcacctggtacgtcgagcacggggtcgccaggggcgtcccctgggacgtcctcaacaggctcgcccggtgcgtcacccggcacgtcgtccacgggttcacctggtagctccccttccgcgtccactggcaccgggcctggaactccggggagcggcacagcgagctcgtcgccgggagcatcgcctgggacatcgagcaccgggtcgccaggagcatcgcccggaacatccagcacaggaagccccggcgcgtcgcccgggacatcaagcacaggttccccgggatcgagcacgccgtccggagccactggatcaccagggagctcgacaccttccggcgcaacgggatcgcccggagccagcccgggtacgtcaagcactggctcccctgcctcgagcgctccctgcaatatccagatggaagatcccacttttaaagagaattatcgcttccatgcaatcaatggctacataatggatacactacctggcttagtaatggctcaggatcaaaggattcgatggtatctgctcagcatgggcagcaatgaaaacatccattctattcatttcagtggacatgtgttcactgtacgaaaaaaagaggagtataaaatggcactgtacaatctctatccaggtgtttttgagacagtggaaatgttaccatccaaagctggaatttggcgggtggaatgccttattggcgagcatctacatgctgggatgagcacactttttctggtgtacagcaataagtgtcagactcccctgggaatggcttctggacacattagagattttcagattacagcttcaggacaatatggacagtgggccccaaagctggccagacttcattattccggatcaatcaatgcctggagcaccaaggagcccttttcttggatcaaggtggatctgttggcaccaatgattattcacggcatcaagacccagggtgcccgtcagaagttctccagcctctacatctctcagtttatcatcatgtatagtcttgatgggaagaagtggcagacttatcgaggaaattccactggaaccttaatggtcttctttggcaatgtggattcatctgggataaaacacaatatttttaaccctccaattattgctcgatacatccgtttgcacccaactcattatagcattcgcagcactcttcgcatggagttgatgggctgtgatttaaatagttgcagcatgccattgggaatggagagtaaagcaatatcagatgcacagattactgcttcatcctactttaccaatatgtttgccacctggtctccttcaaaagctcgacttcacctccaagggaggagtaatgcctggagacctcaggtgaataatccaaaagagtggctgcaagtggacttccagaagacaatgaaagtcacaggagtaactactcagggagtaaaatctctgcttaccagcatgtatgtgaaggagttcctcatctccagcagtcaagatggccatcagtggactctcttttttcagaatggcaaagtaaaggtttttcagggaaatcaagactccttcacacctgtggtgaactctctagacccaccgttactgactcgctaccttcgaattcacccccagagttgggtgcaccagattgccctgaggatggaggttctgggctgcgaggcacaggacctctacggcgcgccacccgggtcgtccccgtcggcgtccaccggaacagggccagggtcatccccgtcagcgtcgactgggacgggacccgggacacccggttcggggactgcatcctcctcgcctggttcgtccaccccgtcaggagccacgggttcgccgggaagcagcccaagcgcatccactggtacagggcctggggcttcaccgggtacttcatccacggggtcaccgggaacgcccggatcggggacggcttcctcatcaccaggatcgtcaacaccctcgggcgcaacgggcagccccggaacccctggttcgggtacggcgtcgtcgagccccggtgcgagcccgggaacaagctcgacaggatcgcctggggcgtcacccggcacgtcgagcacaggcagccccggaacccctggatcgggaaccgcgtcgtcaagcgcctcgagcgaacaaaaactcatctcagaagaggatctgtcacctgcaaccggtcatcatcaccatcaccattga

SEQ ID NO: 1449 - protein, 2053 aa, synthetic construct
  REGION 1..2053: note = Description of Artificial Sequence: Synthetic polypeptide
ATRRYYLGAVELSWDYMQSDLGELPVDARFPPRVPKSFPFNTSVVYKKTLFVEFTDHLFNIAKPRPPWMGLLGPTIQAEVYDTVVITLKNMASHPVSLHAVGVSYWKASEGAEYDDQTSQREKEDDKVFPGGSHTYVWQVLKENGPMASDPLCLTYSYLSHVDLVKDLNSGLIGALLVCREGSLAKEKTQTLHKFILLFAVFDEGKSWHSETKNSLMQDRDAASARAWPKMHTVNGYVNRSLPGLIGCHRKSVYWHVIGMGTTPEVHSIFLEGHTFLVRNHRQASLEISPITFLTAQTLLMDLGQFLLFCHISSHQHDGMEAYVKVDSCPEEPQLRMKNNEEAEDYDDDLTDSEMDVVRFDDDNSPSFIQIRSVAKKHPKTWVHYIAAEEEDWDYAPLVLAPDDRSYKSQYLNNGPQRIGRKYKKVRFMAYTDETFKTREAIQHESGILGPLLYGEVGDTLLIIFKNQASRPYNIYPHGITDVRPLYSRRLPKGVKHLKDFPILPGEIFKYKWTVTVEDGPTKSDPRCLTRYYSSFVNMERDLASGLIGPLLICYKESVDQRGNQIMSDKRNVILFSVFDENRSWYLTENIQRFLPNPAGVQLEDPEFQASNIMHSINGYVFDSLQLSVCLHEVAYWYILSIGAQTDFLSVFFSGYTFKHKMVYEDTLTLFPFSGETVFMSMENPGLWILGCHNSDFRNRGMTALLKVSSCDKNTGDYYEDSYEDISAYLLSKNNAIEPRSFSQNGAPGTPGSGTASSSPGSSTPSGATGSPGASPGTSSTGSPGTPGSGTASSSPGSSTPSGATGSPGSSPSASTGTGPGSSPSASTGTGPGSSTPSGATGSPGSSTPSGATGSPGASPGTSSTGSPGASPGTSSTGSPGASPGTSSTGSPASSPPVLKRHQAEITRTTLQSDQEEIDYDDTISVEMKKEDFDIYDEDENQSPRSFQKKTRHYFIAAVERLWDYGMSSSPHVLRNRAQSGSVPQFKKVVFQEFTDGSFTQPLYRGELNEHLGLLGPYIRAEVEDNIMVTFRNQASRPYSFYSSLISYEEDQRQGAEPRKNFVKPNETKTYFWKVQHHMAPTKDEFDCKAWAYFSDVDLEKDVHSGLIGPLLVCHTNTLNPAHGRQVTVQEFALFFTIFDETKSWYFTENMERNCRGAPGTPGSGTASSSPGSSTPSGATGSPGSSTPSGATGSPGSSTPSGATGSPGSSPSASTGTGPGASPGTSSTGSPGASPGTSSTGSPGTPGSGTASSSPGASPGTSSTGSPGASPGTSSTGSPGASPGTSSTGSPGASPGTSSTGSPGTPGSGTASSSPGSSTPSGATGSPGTPGSGTASSSPGSSTPSGATGSPGTPGSGTASSSPGSSTPSGATGSPGSSTPSGATGSPGSSPSASTGTGPGSSPSASTGTGPGASPGTSSTGSPGTPGSGTASSSPGSSTPSGATGSPASSAPCNIQMEDPTFKENYRFHAINGYIMDTLPGLVMAQDQRIRWYLLSMGSNENIHSIHFSGHVFTVRKKEEYKMALYNLYPGVFETVEMLPSKAGIWRVECLIGEHLHAGMSTLFLVYSNKCQTPLGMASGHIRDFQITASGQYGQWAPKLARLHYSGSINAWSTKEPFSWIKVDLLAPMIIHGIKTQGARQKFSSLYISQFIIMYSLDGKKWQTYRGNSTGTLMVFFGNVDSSGIKHNIFNPPIIARYIRLHPTHYSIRSTLRMELMGCDLNSCSMPLGMESKAISDAQITASSYFTNMFATWSPSKARLHLQGRSNAWRPQVNNPKEWLQVDFQKTMKVTGVTTQGVKSLLTSMYVKEFLISSSQDGHQWTLFFQNGKVKVFQGNQDSFTPVVNSLDPPLLTRYLRIHPQSWVHQIALRMEVLGCEAQDLYGAPPGSSPSASTGTGPGSSPSASTGTGPGTPGSGTASSSPGSSTPSGATGSPGSSPSASTGTGPGASPGTSSTGSPGTPGSGTASSSPGSSTPSGATGSPGTPGSGTASSSPGASPGTSSTGSPGASPGTSSTGSPGTPGSGTASSSASSEQKLISEEDLSPATGHHHHHH

SEQ ID NO: 1450 - DNA, 6162 bp, synthetic construct
  misc_feature 1..6162: note = Description of Artificial Sequence: Synthetic polynucleotide
  source 1..6162: mol_type = other DNA
gccaccagaagatactacctgggtgcagtggaactgtcatgggactatatgcaaagtgatctcggtgagctgcctgtggacgcaagatttcctcctagagtgccaaaatcttttccattcaacacctcagtcgtgtacaaaaagactctgtttgtagaattcacggatcaccttttcaacatcgctaagccaaggccaccctggatgggtctgctaggtcctaccatccaggctgaggtttatgatacagtggtcattacacttaagaacatggcttcccatcctgtcagtcttcatgctgttggtgtatcctactggaaagcttctgagggagctgaatatgatgatcagaccagtcaaagggagaaagaagatgataaagtcttccctggtggaagccatacatatgtctggcaggtcctgaaagagaatggtccaatggcctctgacccactgtgccttacctactcatatctttctcatgtggacctggtaaaagacttgaattcaggcctcattggagccctactagtatgtagagaagggagtctggccaaggaaaagacacagaccttgcacaaatttatactactttttgctgtatttgatgaagggaaaagttggcactcagaaacaaagaactccttgatgcaggatagggatgctgcatctgctcgggcctggcctaaaatgcacacagtcaatggttatgtaaacaggtctctgccaggtctgattggatgccacaggaaatcagtctattggcatgtgattggaatgggcaccactcctgaagtgcactcaatattcctcgaaggtcacacatttcttgtgaggaaccatcgccaggctagcttggaaatctcgccaataactttccttactgctcaaacactcttgatggaccttggacagtttctactgttttgtcatatctcttcccaccaacatgatggcatggaagcttatgtcaaagtagacagctgtccagaggaaccccaactacgaatgaaaaataatgaagaagcggaagactatgatgatgatcttactgattctgaaatggatgtggtcaggtttgatgatgacaactctccttcctttatccaaattcgctcagttgccaagaagcatcctaaaacttgggtacattacattgctgctgaagaggaggactgggactatgctcccttagtcctcgcccccgatgacagaagttataaaagtcaatatttgaacaatggccctcagcggattggtaggaagtacaaaaaagtccgatttatggcatacacagatgaaacctttaagactcgtgaagctattcagcatgaatcaggaatcttgggacctttactttatggggaagttggagacacactgttgattatatttaagaatcaagcaagcagaccatataacatctaccctcacggaatcactgatgtccgtcctttgtattcaaggagattaccaaaaggtgtaaaacatttgaaggattttccaattctgccaggagaaatattcaaatataaatggacagtgactgtagaagatgggccaactaaatcagatcctcggtgcctgacccgctattactctagtttcgttaatatggagagagatctagcttcaggactcattggccctctcctcatctgctacaaagaatctgtagatcaaagaggaaaccagataatgtcagacaagaggaatgtcatcctgttttctgtatttgatgagaaccgaagctggtacctcacagagaatatacaacgctttctccccaatccagctggagtgcagcttgaggatccagagttccaagcctccaacatcatgcacagcatcaatggctatgtttttgatagtttgcagttgtcagtttgtttgcatgaggtggcatactggtacattctaagcattggagcacagactgacttcctttctgtcttcttctctggatataccttcaaacacaaaatggtctatgaagacacactcaccctattcccattctcaggagaaactgtcttcatgtcgatggaaaacccaggtctatggattctggggtgccacaactcagactttcggaacagaggcatgaccgccttactgaaggtttctagttgtgacaagaacactggtgattattacgaggacagttatgaagatatttcagcatacttgctgagtaaaaacaatgccattgaaccaagaagcttctctcaaaacggcgcgccaggtacaccgggcagcggcacggcttcgtcgtcacccggctcgtccacaccgtcgggagctacgggaagcccaggagcgtcaccgggaacgtcgtcaacggggtcaccgggtacgccaggtagcggcacggccagcagctcgccaggttcatcgaccccgtcgggagcgactgggtcgcccggatcaagcccgtcagcttccactggaacaggacccgggtcgtcgccgtcagcctcaacggggacaggacctggttcatcgacgccgtcaggggcgacaggctcgcccggatcgtcaacaccctcgggggcaacggggagccctggtgcgtcgcctggaacctcatccaccggaagcccgggggcctcgccgggtacgagctccacgggatcgcccggagcgtcccccggaacttcaagcacagggagccctgcctcgagcccaccagtcttgaaacgccatcaagctgaaataactcgtactactcttcagtcagatcaagaggaaatcgattatgatgataccatatcagttgaaatgaagaaggaagattttgacatttatgatgaggatgaaaatcagagcccccgcagctttcaaaagaaaacacgacactattttattgctgcagtggagaggctctgggattatgggatgagtagctccccacatgttctaagaaacagggctcagagtggcagtgtccctcagttcaagaaagttgttttccaggaatttactgatggctcctttactcagcccttataccgtggagaactaaatgaacatttgggactcctggggccatatataagagcagaagttgaagataatatcatggtaactttcagaaatcaggcctctcgtccctattccttctattctagccttatttcttatgaggaagatcagaggcaaggagcagaacctagaaaaaactttgtcaagcctaatgaaaccaaaacttacttttggaaagtgcaacatcatatggcacccactaaagatgagtttgactgcaaagcctgggcttatttctctgatgttgacctggaaaaagatgtgcactcaggcctgattggaccccttctggtctgccacactaacacactgaaccctgctcatgggagacaagtgacagtacaggaatttgctctgtttttcaccatctttgatgagaccaaaagctggtacttcactgaaaatatggaaagaaactgcaggggcgcgccaggtacgcccgggtcgggaacagcgtcctcaagcccgggtagctcgacgccgtcaggagccacagggtcgccgggatcgtcgactccatcaggcgcaacgggatcgcctggatcaagcactccatccggagcgacgggaagcccagggagctccccgtccgcatcgactgggacgggacctggagcaagccccggtacgtcgtcaacaggttcgcctggtgcctcgcctggcacgtccagcacggggagccccggaacgccgggttccggaaccgcatcctcctcaccaggtgcctcaccgggcacctcatcaacgggatcaccaggggcttcaccgggaacgagctcgacgggttcaccgggagcgtccccggggacttcgtcgacaggtagcccaggggcaagccccggtacatcgtcaacgggttccccagggacaccggggagcggtactgcatcgtcctcacccggttcctcgacacccagcggagccacgggttcgcccggtactccggggtccggaacggccagcagctcacccggttcctcgacgccatcaggtgccacgggctcgcctggaacgccaggctcgggcactgcgagcagcagccctggatcatcaacgcctagcggagcgaccggctcccctggatcgtcaactccctcgggcgcgactgggagcccaggaagctcaccgtcggcctcgacgggaacagggcctggttcgagcccctcagcttcaacaggaacaggtccaggcgcgtcgccaggtacatcatcgacgggttcgcctgggacccctgggtccggtactgcctcatcatcgcccggatcgtccaccccctcgggagcgacaggttcgcctgcctcgagcgctccctgcaatatccagatggaagatcccacttttaaagagaattatcgcttccatgcaatcaatggctacataatggatacactacctggcttagtaatggctcaggatcaaaggattcgatggtatctgctcagcatgggcagcaatgaaaacatccattctattcatttcagtggacatgtgttcactgtacgaaaaaaagaggagtataaaatggcactgtacaatctctatccaggtgtttttgagacagtggaaatgttaccatccaaagctggaatttggcgggtggaatgccttattggcgagcatctacatgctgggatgagcacactttttctggtgtacagcaataagtgtcagactcccctgggaatggcttctggacacattagagattttcagattacagcttcaggacaatatggacagtgggccccaaagctggccagacttcattattccggatcaatcaatgcctggagcaccaaggagcccttttcttggatcaaggtggatctgttggcaccaatgattattcacggcatcaagacccagggtgcccgtcagaagttctccagcctctacatctctcagtttatcatcatgtatagtcttgatgggaagaagtggcagacttatcgaggaaattccactggaaccttaatggtcttctttggcaatgtggattcatctgggataaaacacaatatttttaaccctccaattattgctcgatacatccgtttgcacccaactcattatagcattcgcagcactcttcgcatggagttgatgggctgtgatttaaatagttgcagcatgccattgggaatggagagtaaagcaatatcagatgcacagattactgcttcatcctactttaccaatatgtttgccacctggtctccttcaaaagctcgacttcacctccaagggaggagtaatgcctggagacctcaggtgaataatccaaaagagtggctgcaagtggacttccagaagacaatgaaagtcacaggagtaactactcagggagtaaaatctctgcttaccagcatgtatgtgaaggagttcctcatctccagcagtcaagatggccatcagtggactctcttttttcagaatggcaaagtaaaggtttttcagggaaatcaagactccttcacacctgtggtgaactctctagacccaccgttactgactcgctaccttcgaattcacccccagagttgggtgcaccagattgccctgaggatggaggttctgggctgcgaggcacaggacctctacggcgcgccacccgggtcgtccccgtcggcgtccaccggaacagggccagggtcatccccgtcagcgtcgactgggacgggacccgggacacccggttcggggactgcatcctcctcgcctggttcgtccaccccgtcaggagccacgggttcgccgggaagcagcccaagcgcatccactggtacagggcctggggcttcaccgggtacttcatccacggggtcaccgggaacgcccggatcggggacggcttcctcatcaccaggatcgtcaacaccctcgggcgcaacgggcagccccggaacccctggttcgggtacggcgtcgtcgagccccggtgcgagcccgggaacaagctcgacaggatcgcctggggcgtcacccggcacgtcgagcacaggcagccccggaacccctggatcgggaaccgcgtcgtcaagcgcctcgagcgaacaaaaactcatctcagaagaggatctgtcacctgcaaccggtcatcatcaccatcaccattga

SEQ ID NO: 1451 - protein, 1945 aa, synthetic construct
  REGION 1..1945: note = Description of Artificial Sequence: Synthetic polypeptide
ATRRYYLGAVELSWDYMQSDLGELPVDARFPPRVPKSFPFNTSVVYKKTLFVEFTDHLFNIAKPRPPWMGLLGPTIQAEVYDTVVITLKNMASHPVSLHAVGVSYWKASEGAEYDDQTSQREKEDDKVFPGGSHTYVWQVLKENGPMASDPLCLTYSYLSHVDLVKDLNSGLIGALLVCREGSLAKEKTQTLHKFILLFAVFDEGKSWHSETKNSLMQDRDAASARAWPKMHTVNGYVNRSLPGLIGCHRKSVYWHVIGMGTTPEVHSIFLEGHTFLVRNHRQASLEISPITFLTAQTLLMDLGQFLLFCHISSHQHDGMEAYVKVDSCPEEPQLRMKNNEEAEDYDDDLTDSEMDVVRFDDDNSPSFIQIRSVAKKHPKTWVHYIAAEEEDWDYAPLVLAPDDRSYKSQYLNNGPQRIGRKYKKVRFMAYTDETFKTREAIQHESGILGPLLYGEVGDTLLIIFKNQASRPYNIYPHGITDVRPLYSRRLPKGVKHLKDFPILPGEIFKYKWTVTVEDGPTKSDPRCLTRYYSSFVNMERDLASGLIGPLLICYKESVDQRGNQIMSDKRNVILFSVFDENRSWYLTENIQRFLPNPAGVQLEDPEFQASNIMHSINGYVFDSLQLSVCLHEVAYWYILSIGAQTDFLSVFFSGYTFKHKMVYEDTLTLFPFSGETVFMSMENPGLWILGCHNSDFRNRGMTALLKVSSCDKNTGDYYEDSYEDISAYLLSKNNAIEPRSFSQNGAPPGASPGTSSTGSPGASPGTSSTGSPGTPGSGTASSSPGSSTPSGATGSPGTPGSGTASSSPGSSTPSGATGSPGTPGSGTASSSPGSSTPSGATGSPGSSTPSGATGSPGSSPSASTGTGPGSSPSASTGTGPGASPGTSSTGSPGTPGSGTASSSPGSSTPSGATGSPGSSPSASTGTGPGSSPSASTGTGPGASPGTSSTGSPGASPGTSSTGSPGSSTPSGATGSPGSSPSASTGTGPGASPGTSSTGSPGSSPSASTGTGPGTPGSGTASSSPGSSTPSGATGSASSPPVLKRHQAEITRTTLQSDQEEIDYDDTISVEMKKEDFDIYDEDENQSPRSFQKKTRHYFIAAVERLWDYGMSSSPHVLRNRAQSGSVPQFKKVVFQEFTDGSFTQPLYRGELNEHLGLLGPYIRAEVEDNIMVTFRNQASRPYSFYSSLISYEEDQRQGAEPRKNFVKPNETKTYFWKVQHHMAPTKDEFDCKAWAYFSDVDLEKDVHSGLIGPLLVCHTNTLNPAHGRQVTVQEFALFFTIFDETKSWYFTENMERNCRGAPGSPAGSPTSTEEGTSESATPESGPGSEPATSGSETPASSAPCNIQMEDPTFKENYRFHAINGYIMDTLPGLVMAQDQRIRWYLLSMGSNENIHSIHFSGHVFTVRKKEEYKMALYNLYPGVFETVEMLPSKAGIWRVECLIGEHLHAGMSTLFLVYSNKCQTPLGMASGHIRDFQITASGQYGQWAPKLARLHYSGSINAWSTKEPFSWIKVDLLAPMIIHGIKTQGARQKFSSLYISQFIIMYSLDGKKWQTYRGNSTGTLMVFFGNVDSSGIKHNIFNPPIIARYIRLHPTHYSIRSTLRMELMGCDLNSCSMPLGMESKAISDAQITASSYFTNMFATWSPSKARLHLQGRSNAWRPQVNNPKEWLQVDFQKTMKVTGVTTQGVKSLLTSMYVKEFLISSSQDGHQWTLFFQNGKVKVFQGNQDSFTPVVNSLDPPLLTRYLRIHPQSWVHQIALRMEVLGCEAQDLYGAPPGSSPSASTGTGPGSSPSASTGTGPGTPGSGTASSSPGSSTPSGATGSPGSSPSASTGTGPGASPGTSSTGSPGTPGSGTASSSPGSSTPSGATGSPGTPGSGTASSSPGASPGTSSTGSPGASPGTSSTGSPGTPGSGTASSSASSEQKLISEEDLSPATGHHHHHH

SEQ ID NO: 1452 - DNA, 5838 bp, synthetic construct
  misc_feature 1..5838: note = Description of Artificial Sequence: Synthetic polynucleotide
  source 1..5838: mol_type = other DNA
gccaccagaagatactacctgggtgcagtggaactgtcatgggactatatgcaaagtgatctcggtgagctgcctgtggacgcaagatttcctcctagagtgccaaaatcttttccattcaacacctcagtcgtgtacaaaaagactctgtttgtagaattcacggatcaccttttcaacatcgctaagccaaggccaccctggatgggtctgctaggtcctaccatccaggctgaggtttatgatacagtggtcattacacttaagaacatggcttcccatcctgtcagtcttcatgctgttggtgtatcctactggaaagcttctgagggagctgaatatgatgatcagaccagtcaaagggagaaagaagatgataaagtcttccctggtggaagccatacatatgtctggcaggtcctgaaagagaatggtccaatggcctctgacccactgtgccttacctactcatatctttctcatgtggacctggtaaaagacttgaattcaggcctcattggagccctactagtatgtagagaagggagtctggccaaggaaaagacacagaccttgcacaaatttatactactttttgctgtatttgatgaagggaaaagttggcactcagaaacaaagaactccttgatgcaggatagggatgctgcatctgctcgggcctggcctaaaatgcacacagtcaatggttatgtaaacaggtctctgccaggtctgattggatgccacaggaaatcagtctattggcatgtgattggaatgggcaccactcctgaagtgcactcaatattcctcgaaggtcacacatttcttgtgaggaaccatcgccaggctagcttggaaatctcgccaataactttccttactgctcaaacactcttgatggaccttggacagtttctactgttttgtcatatctcttcccaccaacatgatggcatggaagcttatgtcaaagtagacagctgtccagaggaaccccaactacgaatgaaaaataatgaagaagcggaagactatgatgatgatcttactgattctgaaatggatgtggtcaggtttgatgatgacaactctccttcctttatccaaattcgctcagttgccaagaagcatcctaaaacttgggtacattacattgctgctgaagaggaggactgggactatgctcccttagtcctcgcccccgatgacagaagttataaaagtcaatatttgaacaatggccctcagcggattggtaggaagtacaaaaaagtccgatttatggcatacacagatgaaacctttaagactcgtgaagctattcagcatgaatcaggaatcttgggacctttactttatggggaagttggagacacactgttgattatatttaagaatcaagcaagcagaccatataacatctaccctcacggaatcactgatgtccgtcctttgtattcaaggagattaccaaaaggtgtaaaacatttgaaggattttccaattctgccaggagaaatattcaaatataaatggacagtgactgtagaagatgggccaactaaatcagatcctcggtgcctgacccgctattactctagtttcgttaatatggagagagatctagcttcaggactcattggccctctcctcatctgctacaaagaatctgtagatcaaagaggaaaccagataatgtcagacaagaggaatgtcatcctgttttctgtatttgatgagaaccgaagctggtacctcacagagaatatacaacgctttctccccaatccagctggagtgcagcttgaggatccagagttccaagcctccaacatcatgcacagcatcaatggctatgtttttgatagtttgcagttgtcagtttgtttgcatgaggtggcatactggtacattctaagcattggagcacagactgacttcctttctgtcttcttctctggatataccttcaaacacaaaatggtctatgaagacacactcaccctattcccattctcaggagaaactgtcttcatgtcgatggaaaacccaggtctatggattctggggtgccacaactcagactttcggaacagaggcatgaccgccttactgaaggtttctagttgtgacaagaacactggtgattattacgaggacagttatgaagatatttcagcatacttgctgagtaaaaacaatgccattgaaccaagaagcttctctcaaaacggcgcgccaccgggagcgtcacccggtacgtcctcaacggggagccctggggcatcacccggcacgtcctcgacagggtcccccggaacaccgggttcggggactgcgtcgtcgtcacccggttcgtcaacacccagcggtgcgacgggttccccgggaacccccggatcaggaacagcgtcgtcgagccccggaagctcgaccccgtcaggagcgaccgggtcgccaggaacgcctgggtcgggtactgcctcatcgtcgccgggttcatcgacgccctccggagcaacaggttcacccgggtcgtccacccccagcggagcgactggatcaccgggatcgagcccgtcggcatcgacaggaacaggtcccggtagctccccatcggcctccacggggacggggcctggtgcgtcaccggggacaagcagcacgggttcgccgggaacgccagggtcagggaccgcgtcgtcgagcccagggtcgtccaccccaagcggggctactgggtccccgggtagctcgccgagcgcatcaacgggaaccggaccgggcagctccccctcagcgtcgacagggacaggccctggcgcgagcccgggaacatcgtcgacggggtcacccggagcatcgccagggacctcgtcaactggctcgcctggatcgtcaacgccctcgggagccacggggtcgcccggatcatccccgtccgcctcaactggcacaggccctggtgcttcccctggaacgtccagcacaggctcccccggttccagcccttccgcttcgactgggactggacccggaaccccgggatcggggacagcgtcaagctcgcccggaagctccacgccttcgggggcaaccgggtcagcctcgagcccaccagtcttgaaacgccatcaagctgaaataactcgtactactcttcagtcagatcaagaggaaatcgattatgatgataccatatcagttgaaatgaagaaggaagattttgacatttatgatgaggatgaaaatcagagcccccgcagctttcaaaagaaaacacgacactattttattgctgcagtggagaggctctgggattatgggatgagtagctccccacatgttctaagaaacagggctcagagtggcagtgtccctcagttcaagaaagttgttttccaggaatttactgatggctcctttactcagcccttataccgtggagaactaaatgaacatttgggactcctggggccatatataagagcagaagttgaagataatatcatggtaactttcagaaatcaggcctctcgtccctattccttctattctagccttatttcttatgaggaagatcagaggcaaggagcagaacctagaaaaaactttgtcaagcctaatgaaaccaaaacttacttttggaaagtgcaacatcatatggcacccactaaagatgagtttgactgcaaagcctgggcttatttctctgatgttgacctggaaaaagatgtgcactcaggcctgattggaccccttctggtctgccacactaacacactgaaccctgctcatgggagacaagtgacagtacaggaatttgctctgtttttcaccatctttgatgagaccaaaagctggtacttcactgaaaatatggaaagaaactgcaggggcgcgccaggttctcctgctggctcccccacctcaacagaagaggggacaagcgaaagcgctacgcctgagagtggccctggctctgagccagccacctccggctctgaaacccctgcctcgagcgctccctgcaatatccagatggaagatcccacttttaaagagaattatcgcttccatgcaatcaatggctacataatggatacactacctggcttagtaatggctcaggatcaaaggattcgatggtatctgctcagcatgggcagcaatgaaaacatccattctattcatttcagtggacatgtgttcactgtacgaaaaaaagaggagtataaaatggcactgtacaatctctatccaggtgtttttgagacagtggaaatgttaccatccaaagctggaatttggcgggtggaatgccttattggcgagcatctacatgctgggatgagcacactttttctggtgtacagcaataagtgtcagactcccctgggaatggcttctggacacattagagattttcagattacagcttcaggacaatatggacagtgggccccaaagctggccagacttcattattccggatcaatcaatgcctggagcaccaaggagcccttttcttggatcaaggtggatctgttggcaccaatgattattcacggcatcaagacccagggtgcccgtcagaagttctccagcctctacatctctcagtttatcatcatgtatagtcttgatgggaagaagtggcagacttatcgaggaaattccactggaaccttaatggtcttctttggcaatgtggattcatctgggataaaacacaatatttttaaccctccaattattgctcgatacatccgtttgcacccaactcattatagcattcgcagcactcttcgcatggagttgatgggctgtgatttaaatagttgcagcatgccattgggaatggagagtaaagcaatatcagatgcacagattactgcttcatcctactttaccaatatgtttgccacctggtctccttcaaaagctcgacttcacctccaagggaggagtaatgcctggagacctcaggtgaataatccaaaagagtggctgcaagtggacttccagaagacaatgaaagtcacaggagtaactactcagggagtaaaatctctgcttaccagcatgtatgtgaaggagttcctcatctccagcagtcaagatggccatcagtggactctcttttttcagaatggcaaagtaaaggtttttcagggaaatcaagactccttcacacctgtggtgaactctctagacccaccgttactgactcgctaccttcgaattcacccccagagttgggtgcaccagattgccctgaggatggaggttctgggctgcgaggcacaggacctctacggcgcgccacccgggtcgtccccgtcggcgtccaccggaacagggccagggtcatccccgtcagcgtcgactgggacgggacccgggacacccggttcggggactgcatcctcctcgcctggttcgtccaccccgtcaggagccacgggttcgccgggaagcagcccaagcgcatccactggtacagggcctggggcttcaccgggtacttcatccacggggtcaccgggaacgcccggatcggggacggcttcctcatcaccaggatcgtcaacaccctcgggcgcaacgggcagccccggaacccctggttcgggtacggcgtcgtcgagccccggtgcgagcccgggaacaagctcgacaggatcgcctggggcgtcacccggcacgtcgagcacaggcagccccggaacccctggatcgggaaccgcgtcgtcaagcgcctcgagcgaacaaaaactcatctcagaagaggatctgtcacctgcaaccggtcatcatcaccatcaccattga

SEQ ID NO: 1453 - protein, 2053 aa, synthetic construct
  REGION 1..2053: note = Description of Artificial Sequence: Synthetic polypeptide
ATRRYYLGAVELSWDYMQSDLGELPVDARFPPRVPKSFPFNTSVVYKKTLFVEFTDHLFNIAKPRPPWMGLLGPTIQAEVYDTVVITLKNMASHPVSLHAVGVSYWKASEGAEYDDQTSQREKEDDKVFPGGSHTYVWQVLKENGPMASDPLCLTYSYLSHVDLVKDLNSGLIGALLVCREGSLAKEKTQTLHKFILLFAVFDEGKSWHSETKNSLMQDRDAASARAWPKMHTVNGYVNRSLPGLIGCHRKSVYWHVIGMGTTPEVHSIFLEGHTFLVRNHRQASLEISPITFLTAQTLLMDLGQFLLFCHISSHQHDGMEAYVKVDSCPEEPQLRMKNNEEAEDYDDDLTDSEMDVVRFDDDNSPSFIQIRSVAKKHPKTWVHYIAAEEEDWDYAPLVLAPDDRSYKSQYLNNGPQRIGRKYKKVRFMAYTDETFKTREAIQHESGILGPLLYGEVGDTLLIIFKNQASRPYNIYPHGITDVRPLYSRRLPKGVKHLKDFPILPGEIFKYKWTVTVEDGPTKSDPRCLTRYYSSFVNMERDLASGLIGPLLICYKESVDQRGNQIMSDKRNVILFSVFDENRSWYLTENIQRFLPNPAGVQLEDPEFQASNIMHSINGYVFDSLQLSVCLHEVAYWYILSIGAQTDFLSVFFSGYTFKHKMVYEDTLTLFPFSGETVFMSMENPGLWILGCHNSDFRNRGMTALLKVSSCDKNTGDYYEDSYEDISAYLLSKNNAIEPRSFSQNGAPPGASPGTSSTGSPGASPGTSSTGSPGTPGSGTASSSPGSSTPSGATGSPGTPGSGTASSSPGSSTPSGATGSPGTPGSGTASSSPGSSTPSGATGSPGSSTPSGATGSPGSSPSASTGTGPGSSPSASTGTGPGASPGTSSTGSPGTPGSGTASSSPGSSTPSGATGSPGSSPSASTGTGPGSSPSASTGTGPGASPGTSSTGSPGASPGTSSTGSPGSSTPSGATGSPGSSPSASTGTGPGASPGTSSTGSPGSSPSASTGTGPGTPGSGTASSSPGSSTPSGATGSASSPPVLKRHQAEITRTTLQSDQEEIDYDDTISVEMKKEDFDIYDEDENQSPRSFQKKTRHYFIAAVERLWDYGMSSSPHVLRNRAQSGSVPQFKKVVFQEFTDGSFTQPLYRGELNEHLGLLGPYIRAEVEDNIMVTFRNQASRPYSFYSSLISYEEDQRQGAEPRKNFVKPNETKTYFWKVQHHMAPTKDEFDCKAWAYFSDVDLEKDVHSGLIGPLLVCHTNTLNPAHGRQVTVQEFALFFTIFDETKSWYFTENMERNCRGAPGTPGSGTASSSPGASPGTSSTGSPGASPGTSSTGSPGASPGTSSTGSPGSSPSASTGTGPGTPGSGTASSSPGASPGTSSTGSPGASPGTSSTGSPGASPGTSSTGSPGSSTPSGATGSPGSSTPSGATGSPGASPGTSSTGSPASSAPCNIQMEDPTFKENYRFHAINGYIMDTLPGLVMAQDQRIRWYLLSMGSNENIHSIHFSGHVFTVRKKEEYKMALYNLYPGVFETVEMLPSKAGIWRVECLIGEHLHAGMSTLFLVYSNKCQTPLGMASGHIRDFQITASGQYGQWAPKLARLHYSGSINAWSTKEPFSWIKVDLLAPMIIHGIKTQGARQKFSSLYISQFIIMYSLDGKKWQTYRGNSTGTLMVFFGNVDSSGIKHNIFNPPIIARYIRLHPTHYSIRSTLRMELMGCDLNSCSMPLGMESKAISDAQITASSYFTNMFATWSPSKARLHLQGRSNAWRPQVNNPKEWLQVDFQKTMKVTGVTTQGVKSLLTSMYVKEFLISSSQDGHQWTLFFQNGKVKVFQGNQDSFTPVVNSLDPPLLTRYLRIHPQSWVHQIALRMEVLGCEAQDLYGAPPGSSPSASTGTGPGSSPSASTGTGPGTPGSGTASSSPGSSTPSGATGSPGSSPSASTGTGPGASPGTSSTGSPGTPGSGTASSSPGSSTPSGATGSPGTPGSGTASSSPGASPGTSSTGSPGASPGTSSTGSPGTPGSGTASSSASSEQKLISEEDLSPATGHHHHHH

SEQ ID NO: 1454 - DNA, 6162 bp, synthetic construct
  misc_feature 1..6162: note = Description of Artificial Sequence: Synthetic polynucleotide
  source 1..6162: mol_type = other DNA
gccaccagaagatactacctgggtgcagtggaactgtcatgggactatatgcaaagtgatctcggtgagctgcctgtggacgcaagatttcctcctagagtgccaaaatcttttccattcaacacctcagtcgtgtacaaaaagactctgtttgtagaattcacggatcaccttttcaacatcgctaagccaaggccaccctggatgggtctgctaggtcctaccatccaggctgaggtttatgatacagtggtcattacacttaagaacatggcttcccatcctgtcagtcttcatgctgttggtgtatcctactggaaagcttctgagggagctgaatatgatgatcagaccagtcaaagggagaaagaagatgataaagtcttccctggtggaagccatacatatgtctggcaggtcctgaaagagaatggtccaatggcctctgacccactgtgccttacctactcatatctttctcatgtggacctggtaaaagacttgaattcaggcctcattggagccctactagtatgtagagaagggagtctggccaaggaaaagacacagaccttgcacaaatttatactactttttgctgtatttgatgaagggaaaagttggcactcagaaacaaagaactccttgatgcaggatagggatgctgcatctgctcgggcctggcctaaaatgcacacagtcaatggttatgtaaacaggtctctgccaggtctgattggatgccacaggaaatcagtctattggcatgtgattggaatgggcaccactcctgaagtgcactcaatattcctcgaaggtcacacatttcttgtgaggaaccatcgccaggctagcttggaaatctcgccaataactttccttactgctcaaacactcttgatggaccttggacagtttctactgttttgtcatatctcttcccaccaacatgatggcatggaagcttatgtcaaagtagacagctgtccagaggaaccccaactacgaatgaaaaataatgaagaagcggaagactatgatgatgatcttactgattctgaaatggatgtggtcaggtttgatgatgacaactctccttcctttatccaaattcgctcagttgccaagaagcatcctaaaacttgggtacattacattgctgctgaagaggaggactgggactatgctcccttagtcctcgcccccgatgacagaagttataaaagtcaatatttgaacaatggccctcagcggattggtaggaagtacaaaaaagtccgatttatggcatacacagatgaaacctttaagactcgtgaagctattcagcatgaatcaggaatcttgggacctttactttatggggaagttggagacacactgttgattatatttaagaatcaagcaagcagaccatataacatctaccctcacggaatcactgatgtccgtcctttgtattcaaggagattaccaaaaggtgtaaaacatttgaaggattttccaattctgccaggagaaatattcaaatataaatggacagtgactgtagaagatgggccaactaaatcagatcctcggtgcctgacccgctattactctagtttcgttaatatggagagagatctagcttcaggactcattggccctctcctcatctgctacaaagaatctgtagatcaaagaggaaaccagataatgtcagacaagaggaatgtcatcctgttttctgtatttgatgagaaccgaagctggtacctcacagagaatatacaacgctttctccccaatccagctggagtgcagcttgaggatccagagttccaagcctccaacatcatgcacagcatcaatggctatgtttttgatagtttgcagttgtcagtttgtttgcatgaggtggcatactggtacattctaagcattggagcacagactgacttcctttctgtcttcttctctggatataccttcaaacacaaaatggtctatgaagacacactcaccctattcccattctcaggagaaactgtcttcatgtcgatggaaaacccaggtctatggattctggggtgccacaactcagactttcggaacagaggcatgaccgccttactgaaggtttctagttgtgacaagaacactggtgattattacgaggacagttatgaagatatttcagcatacttgctgagtaaaaacaatgccattgaaccaagaagcttctctcaaaacggcgcgccaccgggagcgtcacccggtacgtcctcaacggggagccctggggcatcacccggcacgtcctcgacagggtcccccggaacaccgggttcggggactgcgtcgtcgtcacccggttcgtcaacacccagcggtgcgacgggttccccgggaacccccggatcaggaacagcgtcgtcgagccccggaagctcgaccccgtcaggagcgaccgggtcgccaggaacgcctgggtcgggtactgcctcatcgtcgccgggttcatcgacgccctccggagcaacaggttcacccgggtcgtccacccccagcggagcgactggatcaccgggatcgagcccgtcggcatcgacaggaacaggtcccggtagctccccatcggcctccacggggacggggcctggtgcgtcaccggggacaagcagcacgggttcgccgggaacgccagggtcagggaccgcgtcgtcgagcccagggtcgtccaccccaagcggggctactgggtccccgggtagctcgccgagcgcatcaacgggaaccggaccgggcagctccccctcagcgtcgacagggacaggccctggcgcgagcccgggaacatcgtcgacggggtcacccggagcatcgccagggacctcgtcaactggctcgcctggatcgtcaacgccctcgggagccacggggtcgcccggatcatccccgtccgcctcaactggcacaggccctggtgcttcccctggaacgtccagcacaggctcccccggttccagcccttccgcttcgactgggactggacccggaaccccgggatcggggacagcgtcaagctcgcccggaagctccacgccttcgggggcaaccgggtcagcctcgagcccaccagtcttgaaacgccatcaagctgaaataactcgtactactcttcagtcagatcaagaggaaatcgattatgatgataccatatcagttgaaatgaagaaggaagattttgacatttatgatgaggatgaaaatcagagcccccgcagctttcaaaagaaaacacgacactattttattgctgcagtggagaggctctgggattatgggatgagtagctccccacatgttctaagaaacagggctcagagtggcagtgtccctcagttcaagaaagttgttttccaggaatttactgatggctcctttactcagcccttataccgtggagaactaaatgaacatttgggactcctggggccatatataagagcagaagttgaagataatatcatggtaactttcagaaatcaggcctctcgtccctattccttctattctagccttatttcttatgaggaagatcagaggcaaggagcagaacctagaaaaaactttgtcaagcctaatgaaaccaaaacttacttttggaaagtgcaacatcatatggcacccactaaagatgagtttgactgcaaagcctgggcttatttctctgatgttgacctggaaaaagatgtgcactcaggcctgattggaccccttctggtctgccacactaacacactgaaccctgctcatgggagacaagtgacagtacaggaatttgctctgtttttcaccatctttgatgagaccaaaagctggtacttcactgaaaatatggaaagaaactgcaggggcgcgccaggtacacccggatcgggtacagcgtcatcgagccccggtgcgtcacctggtacgtcgagcacggggtcgccaggggcgtcccctgggacgtcctcaacaggctcgcccggtgcgtcacccggcacgtcgtccacgggttcacctggtagctccccttccgcgtccactggcaccgggcctggaactccggggagcggcacagcgagctcgtcgccgggagcatcgcctgggacatcgagcaccgggtcgccaggagcatcgcccggaacatccagcacaggaagccccggcgcgtcgcccgggacatcaagcacaggttccccgggatcgagcacgccgtccggagccactggatcaccagggagctcgacaccttccggcgcaacgggatcgcccggagccagcccgggtacgtcaagcactggctcccctgcctcgagcgctccctgcaatatccagatggaagatcccacttttaaagagaattatcgcttccatgcaatcaatggctacataatggatacactacctggcttagtaatggctcaggatcaaaggattcgatggtatctgctcagcatgggcagcaatgaaaacatccattctattcatttcagtggacatgtgttcactgtacgaaaaaaagaggagtataaaatggcactgtacaatctctatccaggtgtttttgagacagtggaaatgttaccatccaaagctggaatttggcgggtggaatgccttattggcgagcatctacatgctgggatgagcacactttttctggtgtacagcaataagtgtcagactcccctgggaatggcttctggacacattagagattttcagattacagcttcaggacaatatggacagtgggccccaaagctggccagacttcattattccggatcaatcaatgcctggagcaccaaggagcccttttcttggatcaaggtggatctgttggcaccaatgattattcacggcatcaagacccagggtgcccgtcagaagttctccagcctctacatctctcagtttatcatcatgtatagtcttgatgggaagaagtggcagacttatcgaggaaattccactggaaccttaatggtcttctttggcaatgtggattcatctgggataaaacacaatatttttaaccctccaattattgctcgatacatccgtttgcacccaactcattatagcattcgcagcactcttcgcatggagttgatgggctgtgatttaaatagttgcagcatgccattgggaatggagagtaaagcaatatcagatgcacagattactgcttcatcctactttaccaatatgtttgccacctggtctccttcaaaagctcgacttcacctccaagggaggagtaatgcctggagacctcaggtgaataatccaaaagagtggctgcaagtggacttccagaagacaatgaaagtcacaggagtaactactcagggagtaaaatctctgcttaccagcatgtatgtgaaggagttcctcatctccagcagtcaagatggccatcagtggactctcttttttcagaatggcaaagtaaaggtttttcagggaaatcaagactccttcacacctgtggtgaactctctagacccaccgttactgactcgctaccttcgaattcacccccagagttgggtgcaccagattgccctgaggatggaggttctgggctgcgaggcacaggacctctacggcgcgccacccgggtcgtccccgtcggcgtccaccggaacagggccagggtcatccccgtcagcgtcgactgggacgggacccgggacacccggttcggggactgcatcctcctcgcctggttcgtccaccccgtcaggagccacgggttcgccgggaagcagcccaagcgcatccactggtacagggcctggggcttcaccgggtacttcatccacggggtcaccgggaacgcccggatcggggacggcttcctcatcaccaggatcgtcaacaccctcgggcgcaacgggcagccccggaacccctggttcgggtacggcgtcgtcgagccccggtgcgagcccgggaacaagctcgacaggatcgcctggggcgtcacccggcacgtcgagcacaggcagccccggaacccctggatcgggaaccgcgtcgtcaagcgcctcgagcgaacaaaaactcatctcagaagaggatctgtcacctgcaaccggtcatcatcaccatcaccattga

SEQ ID NO: 1455 - protein, 2197 aa, synthetic construct
  REGION 1..2197: note = Description of Artificial Sequence: Synthetic polypeptide
ATRRYYLGAVELSWDYMQSDLGELPVDARFPPRVPKSFPFNTSVVYKKTLFVEFTDHLFNIAKPRPPWMGLLGPTIQAEVYDTVVITLKNMASHPVSLHAVGVSYWKASEGAEYDDQTSQREKEDDKVFPGGSHTYVWQVLKENGPMASDPLCLTYSYLSHVDLVKDLNSGLIGALLVCREGSLAKEKTQTLHKFILLFAVFDEGKSWHSETKNSLMQDRDAASARAWPKMHTVNGYVNRSLPGLIGCHRKSVYWHVIGMGTTPEVHSIFLEGHTFLVRNHRQASLEISPITFLTAQTLLMDLGQFLLFCHISSHQHDGMEAYVKVDSCPEEPQLRMKNNEEAEDYDDDLTDSEMDVVRFDDDNSPSFIQIRSVAKKHPKTWVHYIAAEEEDWDYAPLVLAPDDRSYKSQYLNNGPQRIGRKYKKVRFMAYTDETFKTREAIQHESGILGPLLYGEVGDTLLIIFKNQASRPYNIYPHGITDVRPLYSRRLPKGVKHLKDFPILPGEIFKYKWTVTVEDGPTKSDPRCLTRYYSSFVNMERDLASGLIGPLLICYKESVDQRGNQIMSDKRNVILFSVFDENRSWYLTENIQRFLPNPAGVQLEDPEFQASNIMHSINGYVFDSLQLSVCLHEVAYWYILSIGAQTDFLSVFFSGYTFKHKMVYEDTLTLFPFSGETVFMSMENPGLWILGCHNSDFRNRGMTALLKVSSCDKNTGDYYEDSYEDISAYLLSKNNAIEPRSFSQNGAPPGASPGTSSTGSPGASPGTSSTGSPGTPGSGTASSSPGSSTPSGATGSPGTPGSGTASSSPGSSTPSGATGSPGTPGSGTASSSPGSSTPSGATGSPGSSTPSGATGSPGSSPSASTGTGPGSSPSASTGTGPGASPGTSSTGSPGTPGSGTASSSPGSSTPSGATGSPGSSPSASTGTGPGSSPSASTGTGPGASPGTSSTGSPGASPGTSSTGSPGSSTPSGATGSPGSSPSASTGTGPGASPGTSSTGSPGSSPSASTGTGPGTPGSGTASSSPGSSTPSGATGSASSPPVLKRHQAEITRTTLQSDQEEIDYDDTISVEMKKEDFDIYDEDENQSPRSFQKKTRHYFIAAVERLWDYGMSSSPHVLRNRAQSGSVPQFKKVVFQEFTDGSFTQPLYRGELNEHLGLLGPYIRAEVEDNIMVTFRNQASRPYSFYSSLISYEEDQRQGAEPRKNFVKPNETKTYFWKVQHHMAPTKDEFDCKAWAYFSDVDLEKDVHSGLIGPLLVCHTNTLNPAHGRQVTVQEFALFFTIFDETKSWYFTENMERNCRGAPGTPGSGTASSSPGSSTPSGATGSPGSSTPSGATGSPGSSTPSGATGSPGSSPSASTGTGPGASPGTSSTGSPGASPGTSSTGSPGTPGSGTASSSPGASPGTSSTGSPGASPGTSSTGSPGASPGTSSTGSPGASPGTSSTGSPGTPGSGTASSSPGSSTPSGATGSPGTPGSGTASSSPGSSTPSGATGSPGTPGSGTASSSPGSSTPSGATGSPGSSTPSGATGSPGSSPSASTGTGPGSSPSASTGTGPGASPGTSSTGSPGTPGSGTASSSPGSSTPSGATGSPASSAPCNIQMEDPTFKENYRFHAINGYIMDTLPGLVMAQDQRIRWYLLSMGSNENIHSIHFSGHVFTVRKKEEYKMALYNLYPGVFETVEMLPSKAGIWRVECLIGEHLHAGMSTLFLVYSNKCQTPLGMASGHIRDFQITASGQYGQWAPKLARLHYSGSINAWSTKEPFSWIKVDLLAPMIIHGIKTQGARQKFSSLYISQFIIMYSLDGKKWQTYRGNSTGTLMVFFGNVDSSGIKHNIFNPPIIARYIRLHPTHYSIRSTLRMELMGCDLNSCSMPLGMESKAISDAQITASSYFTNMFATWSPSKARLHLQGRSNAWRPQVNNPKEWLQVDFQKTMKVTGVTTQGVKSLLTSMYVKEFLISSSQDGHQWTLFFQNGKVKVFQGNQDSFTPVVNSLDPPLLTRYLRIHPQSWVHQIALRMEVLGCEAQDLYGAPPGSSPSASTGTGPGSSPSASTGTGPGTPGSGTASSSPGSSTPSGATGSPGSSPSASTGTGPGASPGTSSTGSPGTPGSGTASSSPGSSTPSGATGSPGTPGSGTASSSPGASPGTSSTGSPGASPGTSSTGSPGTPGSGTASSSASSEQKLISEEDLSPATGHHHHHH

SEQ ID NO: 1456 - DNA, 6594 bp, synthetic construct
  misc_feature 1..6594: note = Description of Artificial Sequence: Synthetic polynucleotide
  source 1..6594: mol_type = other DNA
gccaccagaagatactacctgggtgcagtggaactgtcatgggactatatgcaaagtgatctcggtgagctgcctgtggacgcaagatttcctcctagagtgccaaaatcttttccattcaacacctcagtcgtgtacaaaaagactctgtttgtagaattcacggatcaccttttcaacatcgctaagccaaggccaccctggatgggtctgctaggtcctaccatccaggctgaggtttatgatacagtggtcattacacttaagaacatggcttcccatcctgtcagtcttcatgctgttggtgtatcctactggaaagcttctgagggagctgaatatgatgatcagaccagtcaaagggagaaagaagatgataaagtcttccctggtggaagccatacatatgtctggcaggtcctgaaagagaatggtccaatggcctctgacccactgtgccttacctactcatatctttctcatgtggacctggtaaaagacttgaattcaggcctcattggagccctactagtatgtagagaagggagtctggccaaggaaaagacacagaccttgcacaaatttatactactttttgctgtatttgatgaagggaaaagttggcactcagaaacaaagaactccttgatgcaggatagggatgctgcatctgctcgggcctggcctaaaatgcacacagtcaatggttatgtaaacaggtctctgccaggtctgattggatgccacaggaaatcagtctattggcatgtgattggaatgggcaccactcctgaagtgcactcaatattcctcgaaggtcacacatttcttgtgaggaaccatcgccaggctagcttggaaatctcgccaataactttccttactgctcaaacactcttgatggaccttggacagtttctactgttttgtcatatctcttcccaccaacatgatggcatggaagcttatgtcaaagtagacagctgtccagaggaaccccaactacgaatgaaaaataatgaagaagcggaagactatgatgatgatcttactgattctgaaatggatgtggtcaggtttgatgatgacaactctccttcctttatccaaattcgctcagttgccaagaagcatcctaaaacttgggtacattacattgctgctgaagaggaggactgggactatgctcccttagtcctcgcccccgatgacagaagttataaaagtcaatatttgaacaatggccctcagcggattggtaggaagtacaaaaaagtccgatttatggcatacacagatgaaacctttaagactcgtgaagctattcagcatgaatcaggaatcttgggacctttactttatggggaagttggagacacactgttgattatatttaagaatcaagcaagcagaccatataacatctaccctcacggaatcactgatgtccgtcctttgtattcaaggagattaccaaaaggtgtaaaacatttgaaggattttccaattctgccaggagaaatattcaaatataaatggacagtgactgtagaagatgggccaactaaatcagatcctcggtgcctgacccgctattactctagtttcgttaatatggagagagatctagcttcaggactcattggccctctcctcatctgctacaaagaatctgtagatcaaagaggaaaccagataatgtcagacaagaggaatgtcatcctgttttctgtatttgatgagaaccgaagctggtacctcacagagaatatacaacgctttctccccaatccagctggagtgcagcttgaggatccagagttccaagcctccaacatcatgcacagcatcaatggctatgtttttgatagtttgcagttgtcagtttgtttgcatgaggtggcatactggtacattctaagcattggagcacagactgacttcctttctgtcttcttctctggatataccttcaaacacaaaatggtctatgaagacacactcaccctattcccattctcaggagaaactgtcttcatgtcgatggaaaacccaggtctatggattctggggtgccacaactcagactttcggaacagaggcatgaccgccttactgaaggtttctagttgtgacaagaacactggtgattattacgaggacagttatgaagatatttcagcatacttgctgagtaaaaacaatgccattgaaccaagaagcttctctcaaaacggcgcgccaccgggagcgtcacccggtacgtcctcaacggggagccctggggcatcacccggcacgtcctcgacagggtcccccggaacaccgggttcggggactgcgtcgtcgtcacccggttcgtcaacacccagcggtgcgacgggttccccgggaacccccggatcaggaacagcgtcgtcgagccccggaagctcgaccccgtcaggagcgaccgggtcgccaggaacgcctgggtcgggtactgcctcatcgtcgccgggttcatcgacgccctccggagcaacaggttcacccgggtcgtccacccccagcggagcgactggatcaccgggatcgagcccgtcggcatcgacaggaacaggtcccggtagctccccatcggcctccacggggacggggcctggtgcgtcaccggggacaagcagcacgggttcgccgggaacgccagggtcagggaccgcgtcgtcgagcccagggtcgtccaccccaagcggggctactgggtccccgggtagctcgccgagcgcatcaacgggaaccggaccgggcagctccccctcagcgtcgacagggacaggccctggcgcgagcccgggaacatcgtcgacggggtcacccggagcatcgccagggacctcgtcaactggctcgcctggatcgtcaacgccctcgggagccacggggtcgcccggatcatccccgtccgcctcaactggcacaggccctggtgcttcccctggaacgtccagcacaggctcccccggttccagcccttccgcttcgactgggactggacccggaaccccgggatcggggacagcgtcaagctcgcccggaagctccacgccttcgggggcaaccgggtcagcctcgagcccaccagtcttgaaacgccatcaagctgaaataactcgtactactcttcagtcagatcaagaggaaatcgattatgatgataccatatcagttgaaatgaagaaggaagattttgacatttatgatgaggatgaaaatcagagcccccgcagctttcaaaagaaaacacgacactattttattgctgcagtggagaggctctgggattatgggatgagtagctccccacatgttctaagaaacagggctcagagtggcagtgtccctcagttcaagaaagttgttttccaggaatttactgatggctcctttactcagcccttataccgtggagaactaaatgaacatttgggactcctggggccatatataagagcagaagttgaagataatatcatggtaactttcagaaatcaggcctctcgtccctattccttctattctagccttatttcttatgaggaagatcagaggcaaggagcagaacctagaaaaaactttgtcaagcctaatgaaaccaaaacttacttttggaaagtgcaacatcatatggcacccactaaagatgagtttgactgcaaagcctgggcttatttctctgatgttgacctggaaaaagatgtgcactcaggcctgattggaccccttctggtctgccacactaacacactgaaccctgctcatgggagacaagtgacagtacaggaatttgctctgtttttcaccatctttgatgagaccaaaagctggtacttcactgaaaatatggaaagaaactgcaggggcgcgccaggtacgcccgggtcgggaacagcgtcctcaagcccgggtagctcgacgccgtcaggagccacagggtcgccgggatcgtcgactccatcaggcgcaacgggatcgcctggatcaagcactccatccggagcgacgggaagcccagggagctccccgtccgcatcgactgggacgggacctggagcaagccccggtacgtcgtcaacaggttcgcctggtgcctcgcctggcacgtccagcacggggagccccggaacgccgggttccggaaccgcatcctcctcaccaggtgcctcaccgggcacctcatcaacgggatcaccaggggcttcaccgggaacgagctcgacgggttcaccgggagcgtccccggggacttcgtcgacaggtagcccaggggcaagccccggtacatcgtcaacgggttccccagggacaccggggagcggtactgcatcgtcctcacccggttcctcgacacccagcggagccacgggttcgcccggtactccggggtccggaacggccagcagctcacccggttcctcgacgccatcaggtgccacgggctcgcctggaacgccaggctcgggcactgcgagcagcagccctggatcatcaacgcctagcggagcgaccggctcccctggatcgtcaactccctcgggcgcgactgggagcccaggaagctcaccgtcggcctcgacgggaacagggcctggttcgagcccctcagcttcaacaggaacaggtccaggcgcgtcgccaggtacatcatcgacgggttcgcctgggacccctgggtccggtactgcctcatcatcgcccggatcgtccaccccctcgggagcgacaggttcgcctgcctcgagcgctccctgcaatatccagatggaagatcccacttttaaagagaattatcgcttccatgcaatcaatggctacataatggatacactacctggcttagtaatggctcaggatcaaaggattcgatggtatctgctcagcatgggcagcaatgaaaacatccattctattcatttcagtggacatgtgttcactgtacgaaaaaaagaggagtataaaatggcactgtacaatctctatccaggtgtttttgagacagtggaaatgttaccatccaaagctggaatttggcgggtggaatgccttattggcgagcatctacatgctgggatgagcacactttttctggtgtacagcaataagtgtcagactcccctgggaatggcttctggacacattagagattttcagattacagcttcaggacaatatggacagtgggccccaaagctggccagacttcattattccggatcaatcaatgcctggagcaccaaggagcccttttcttggatcaaggtggatctgttggcaccaatgattattcacggcatcaagacccagggtgcccgtcagaagttctccagcctctacatctctcagtttatcatcatgtatagtcttgatgggaagaagtggcagacttatcgaggaaattccactggaaccttaatggtcttctttggcaatgtggattcatctgggataaaacacaatatttttaaccctccaattattgctcgatacatccgtttgcacccaactcattatagcattcgcagcactcttcgcatggagttgatgggctgtgatttaaatagttgcagcatgccattgggaatggagagtaaagcaatatcagatgcacagattactgcttcatcctactttaccaatatgtttgccacctggtctccttcaaaagctcgacttcacctccaagggaggagtaatgcctggagacctcaggtgaataatccaaaagagtggctgcaagtggacttccagaagacaatgaaagtcacaggagtaactactcagggagtaaaatctctgcttaccagcatgtatgtgaaggagttcctcatctccagcagtcaagatggccatcagtggactctcttttttcagaatggcaaagtaaaggtttttcagggaaatcaagactccttcacacctgtggtgaactctctagacccaccgttactgactcgctaccttcgaattcacccccagagttgggtgcaccagattgccctgaggatggaggttctgggctgcgaggcacaggacctctacggcgcgccacccgggtcgtccccgtcggcgtccaccggaacagggccagggtcatccccgtcagcgtcgactgggacgggacccgggacacccggttcggggactgcatcctcctcgcctggttcgtccaccccgtcaggagccacgggttcgccgggaagcagcccaagcgcatccactggtacagggcctggggcttcaccgggtacttcatccacggggtcaccgggaacgcccggatcggggacggcttcctcatcaccaggatcgtcaacaccctcgggcgcaacgggcagccccggaacccctggttcgggtacggcgtcgtcgagccccggtgcgagcccgggaacaagctcgacaggatcgcctggggcgtcacccggcacgtcgagcacaggcagccccggaacccctggatcgggaaccgcgtcgtcaagcgcctcgagcgaacaaaaactcatctcagaagaggatctgtcacctgcaaccggtcatcatcaccatcaccattga

SEQ ID NO: 1457 - protein, 1837 aa, synthetic construct
  REGION 1..1837: note = Description of Artificial Sequence: Synthetic polypeptide
ATRRYYLGAVELSWDYMQSDLGELPVDARFPPRVPKSFPFNTSVVYKKTLFVEFTDHLFNIAKPRPPWMGLLGPTIQAEVYDTVVITLKNMASHPVSLHAVGVSYWKASEGAEYDDQTSQREKEDDKVFPGGSHTYVWQVLKENGPMASDPLCLTYSYLSHVDLVKDLNSGLIGALLVCREGSLAKEKTQTLHKFILLFAVFDEGKSWHSETKNSLMQDRDAASARAWPKMHTVNGYVNRSLPGLIGCHRKSVYWHVIGMGTTPEVHSIFLEGHTFLVRNHRQASLEISPITFLTAQTLLMDLGQFLLFCHISSHQHDGMEAYVKVDSCPEEPQLRMKNNEEAEDYDDDLTDSEMDVVRFDDDNSPSFIQIRSVAKKHPKTWVHYIAAEEEDWDYAPLVLAPDDRSYKSQYLNNGPQRIGRKYKKVRFMAYTDETFKTREAIQHESGILGPLLYGEVGDTLLIIFKNQASRPYNIYPHGITDVRPLYSRRLPKGVKHLKDFPILPGEIFKYKWTVTVEDGPTKSDPRCLTRYYSSFVNMERDLASGLIGPLLICYKESVDQRGNQIMSDKRNVILFSVFDENRSWYLTENIQRFLPNPAGVQLEDPEFQASNIMHSINGYVFDSLQLSVCLHEVAYWYILSIGAQTDFLSVFFSGYTFKHKMVYEDTLTLFPFSGETVFMSMENPGLWILGCHNSDFRNRGMTALLKVSSCDKNTGDYYEDSYEDISAYLLSKNNAIEPRSFSQNGAPGSPAGSPTSTEEGTSESATPESGPGSEPATSGSETPASSPPVLKRHQAEITRTTLQSDQEEIDYDDTISVEMKKEDFDIYDEDENQSPRSFQKKTRHYFIAAVERLWDYGMSSSPHVLRNRAQSGSVPQFKKVVFQEFTDGSFTQPLYRGELNEHLGLLGPYIRAEVEDNIMVTFRNQASRPYSFYSSLISYEEDQRQGAEPRKNFVKPNETKTYFWKVQHHMAPTKDEFDCKAWAYFSDVDLEKDVHSGLIGPLLVCHTNTLNPAHGRQVTVQEFALFFTIFDETKSWYFTENMERNCRGAPGSPAGSPTSTEEGTSESATPESGPGSEPATSGSETPASSAPCNIQMEDPTFKENYRFHAINGYIMDTLPGLVMAQDQRIRWYLLSMGSNENIHSIHFSGHVFTVRKKEEYKMALYNLYPGVFETVEMLPSKAGIWRVECLIGEHLHAGMSTLFLVYSNKCQTPLGMASGHIRDFQITASGQYGQWAPKLARLHYSGSINAWSTKEPFSWIKVDLLAPMIIHGIKTQGARQKFSSLYISQFIIMYSLDGKKWQTYRGNSTGTLMVFFGNVDSSGIKHNIFNPPIIARYIRLHPTHYSIRSTLRMELMGCDLNSCSMPLGMESKAISDAQITASSYFTNMFATWSPSKARLHLQGRSNAWRPQVNNPKEWLQVDFQKTMKVTGVTTQGVKSLLTSMYVKEFLISSSQDGHQWTLFFQNGKVKVFQGNQDSFTPVVNSLDPPLLTRYLRIHPQSWVHQIALRMEVLGCEAQDLYGAPPGASPGTSSTGSPGASPGTSSTGSPGTPGSGTASSSPGSSTPSGATGSPGTPGSGTASSSPGSSTPSGATGSPGTPGSGTASSSPGSSTPSGATGSPGSSTPSGATGSPGSSPSASTGTGPGSSPSASTGTGPGASPGTSSTGSPGTPGSGTASSSPGSSTPSGATGSPGSSPSASTGTGPGSSPSASTGTGPGASPGTSSTGSPGASPGTSSTGSPGSSTPSGATGSPGSSPSASTGTGPGASPGTSSTGSPGSSPSASTGTGPGTPGSGTASSSPGSSTPSGATGSASSEQKLISEEDLSPATGHHHHHH

SEQ ID NO: 1458 - DNA, 5514 bp, synthetic construct
  misc_feature 1..5514: note = Description of Artificial Sequence: Synthetic polynucleotide
  source 1..5514: mol_type = other DNA
gccaccagaagatactacctgggtgcagtggaactgtcatgggactatatgcaaagtgatctcggtgagctgcctgtggacgcaagatttcctcctagagtgccaaaatcttttccattcaacacctcagtcgtgtacaaaaagactctgtttgtagaattcacggatcaccttttcaacatcgctaagccaaggccaccctggatgggtctgctaggtcctaccatccaggctgaggtttatgatacagtggtcattacacttaagaacatggcttcccatcctgtcagtcttcatgctgttggtgtatcctactggaaagcttctgagggagctgaatatgatgatcagaccagtcaaagggagaaagaagatgataaagtcttccctggtggaagccatacatatgtctggcaggtcctgaaagagaatggtccaatggcctctgacccactgtgccttacctactcatatctttctcatgtggacctggtaaaagacttgaattcaggcctcattggagccctactagtatgtagagaagggagtctggccaaggaaaagacacagaccttgcacaaatttatactactttttgctgtatttgatgaagggaaaagttggcactcagaaacaaagaactccttgatgcaggatagggatgctgcatctgctcgggcctggcctaaaatgcacacagtcaatggttatgtaaacaggtctctgccaggtctgattggatgccacaggaaatcagtctattggcatgtgattggaatgggcaccactcctgaagtgcactcaatattcctcgaaggtcacacatttcttgtgaggaaccatcgccaggctagcttggaaatctcgccaataactttccttactgctcaaacactcttgatggaccttggacagtttctactgttttgtcatatctcttcccaccaacatgatggcatggaagcttatgtcaaagtagacagctgtccagaggaaccccaactacgaatgaaaaataatgaagaagcggaagactatgatgatgatcttactgattctgaaatggatgtggtcaggtttgatgatgacaactctccttcctttatccaaattcgctcagttgccaagaagcatcctaaaacttgggtacattacattgctgctgaagaggaggactgggactatgctcccttagtcctcgcccccgatgacagaagttataaaagtcaatatttgaacaatggccctcagcggattggtaggaagtacaaaaaagtccgatttatggcatacacagatgaaacctttaagactcgtgaagctattcagcatgaatcaggaatcttgggacctttactttatggggaagttggagacacactgttgattatatttaagaatcaagcaagcagaccatataacatctaccctcacggaatcactgatgtccgtcctttgtattcaaggagattaccaaaaggtgtaaaacatttgaaggattttccaattctgccaggagaaatattcaaatataaatggacagtgactgtagaagatgggccaactaaatcagatcctcggtgcctgacccgctattactctagtttcgttaatatggagagagatctagcttcaggactcattggccctctcctcatctgctacaaagaatctgtagatcaaagaggaaaccagataatgtcagacaagaggaatgtcatcctgttttctgtatttgatgagaaccgaagctggtacctcacagagaatatacaacgctttctccccaatccagctggagtgcagcttgaggatccagagttccaagcctccaacatcatgcacagcatcaatggctatgtttttgatagtttgcagttgtcagtttgtttgcatgaggtggcatactggtacattctaagcattggagcacagactgacttcctttctgtcttcttctctggatataccttcaaacacaaaatggtctatgaagacacactcaccctattcccattctcaggagaaactgtcttcatgtcgatggaaaacccaggtctatggattctggggtgccacaactcagactttcggaacagaggcatgaccgccttactgaaggtttctagttgtgacaagaacactggtgattattacgaggacagttatgaagatatttcagcatacttgctgagtaaaaacaatgccattgaaccaagaagcttctctcaaaacggcgcgccaggttctcctgctggctcccccacctcaacagaagaggggacaagcgaaagcgctacgcctgagagtggccctggctctgagccagccacctccggctctgaaacccctgcctcgagcccaccagtcttgaaacgccatcaagctgaaataactcgtactactcttcagtcagatcaagaggaaatcgattatgatgataccatatcagttgaaatgaagaaggaagattttgacatttatgatgaggatgaaaatcagagcccccgcagctttcaaaagaaaacacgacactattttattgctgcagtggagaggctctgggattatgggatgagtagctccccacatgttctaagaaacagggctcagagtggcagtgtccctcagttcaagaaagttgttttccaggaatttactgatggctcctttactcagcccttataccgtggagaactaaatgaacatttgggactcctggggccatatataagagcagaagttgaagataatatcatggtaactttcagaaatcaggcctctcgtccctattccttctattctagccttatttcttatgaggaagatcagaggcaaggagcagaacctagaaaaaactttgtcaagcctaatgaaaccaaaacttacttttggaaagtgcaacatcatatggcacccactaaagatgagtttgactgcaaagcctgggcttatttctctgatgttgacctggaaaaagatgtgcactcaggcctgattggaccccttctggtctgccacactaacacactgaaccctgctcatgggagacaagtgacagtacaggaatttgctctgtttttcaccatctttgatgagaccaaaagctggtacttcactgaaaatatggaaagaaactgcaggggcgcgccaggttctcctgctggctcccccacctcaacagaagaggggacaagcgaaagcgctacgcctgagagtggccctggctctgagccagccacctccggctctgaaacccctgcctcgagcgctccctgcaatatccagatggaagatcccacttttaaagagaattatcgcttccatgcaatcaatggctacataatggatacactacctggcttagtaatggctcaggatcaaaggattcgatggtatctgctcagcatgggcagcaatgaaaacatccattctattcatttcagtggacatgtgttcactgtacgaaaaaaagaggagtataaaatggcactgtacaatctctatccaggtgtttttgagacagtggaaatgttaccatccaaagctggaatttggcgggtggaatgccttattggcgagcatctacatgctgggatgagcacactttttctggtgtacagcaataagtgtcagactcccctgggaatggcttctggacacattagagattttcagattacagcttcaggacaatatggacagtgggccccaaagctggccagacttcattattccggatcaatcaatgcctggagcaccaaggagcccttttcttggatcaaggtggatctgttggcaccaatgattattcacggcatcaagacccagggtgcccgtcagaagttctccagcctctacatctctcagtttatcatcatgtatagtcttgatgggaagaagtggcagacttatcgaggaaattccactggaaccttaatggtcttctttggcaatgtggattcatctgggataaaacacaatatttttaaccctccaattattgctcgatacatccgtttgcacccaactcattatagcattcgcagcactcttcgcatggagttgatgggctgtgatttaaatagttgcagcatgccattgggaatggagagtaaagcaatatcagatgcacagattactgcttcatcctactttaccaatatgtttgccacctggtctccttcaaaagctcgacttcacctccaagggaggagtaatgcctggagacctcaggtgaataatccaaaagagtggctgcaagtggacttccagaagacaatgaaagtcacaggagtaactactcagggagtaaaatctctgcttaccagcatgtatgtgaaggagttcctcatctccagcagtcaagatggccatcagtggactctcttttttcagaatggcaaagtaaaggtttttcagggaaatcaagactccttcacacctgtggtgaactctctagacccaccgttactgactcgctaccttcgaattcacccccagagttgggtgcaccagattgccctgaggatggaggttctgggctgcgaggcacaggacctctacggcgcgccaccgggagcgtcacccggtacgtcctcaacggggagccctggggcatcacccggcacgtcctcgacagggtcccccggaacaccgggttcggggactgcgtcgtcgtcacccggttcgtcaacacccagcggtgcgacgggttccccgggaacccccggatcaggaacagcgtcgtcgagccccggaagctcgaccccgtcaggagcgaccgggtcgccaggaacgcctgggtcgggtactgcctcatcgtcgccgggttcatcgacgccctccggagcaacaggttcacccgggtcgtccacccccagcggagcgactggatcaccgggatcgagcccgtcggcatcgacaggaacaggtcccggtagctccccatcggcctccacggggacggggcctggtgcgtcaccggggacaagcagcacgggttcgccgggaacgccagggtcagggaccgcgtcgtcgagcccagggtcgtccaccccaagcggggctactgggtccccgggtagctcgccgagcgcatcaacgggaaccggaccgggcagctccccctcagcgtcgacagggacaggccctggcgcgagcccgggaacatcgtcgacggggtcacccggagcatcgccagggacctcgtcaactggctcgcctggatcgtcaacgccctcgggagccacggggtcgcccggatcatccccgtccgcctcaactggcacaggccctggtgcttcccctggaacgtccagcacaggctcccccggttccagcccttccgcttcgactgggactggacccggaaccccgggatcggggacagcgtcaagctcgcccggaagctccacgccttcgggggcaaccgggtcagcctcgagcgaacaaaaactcatctcagaagaggatctgtcacctgcaaccggtcatcatcaccatcaccattga

SEQ ID NO: 1459 - protein, 1945 aa, synthetic construct
  REGION 1..1945: note = Description of Artificial Sequence: Synthetic polypeptide
ATRRYYLGAVELSWDYMQSDLGELPVDARFPPRVPKSFPFNTSVVYKKTLFVEFTDHLFNIAKPRPPWMGLLGPTIQAEVYDTVVITLKNMASHPVSLHAVGVSYWKASEGAEYDDQTSQREKEDDKVFPGGSHTYVWQVLKENGPMASDPLCLTYSYLSHVDLVKDLNSGLIGALLVCREGSLAKEKTQTLHKFILLFAVFDEGKSWHSETKNSLMQDRDAASARAWPKMHTVNGYVNRSLPGLIGCHRKSVYWHVIGMGTTPEVHSIFLEGHTFLVRNHRQASLEISPITFLTAQTLLMDLGQFLLFCHISSHQHDGMEAYVKVDSCPEEPQLRMKNNEEAEDYDDDLTDSEMDVVRFDDDNSPSFIQIRSVAKKHPKTWVHYIAAEEEDWDYAPLVLAPDDRSYKSQYLNNGPQRIGRKYKKVRFMAYTDETFKTREAIQHESGILGPLLYGEVGDTLLIIFKNQASRPYNIYPHGITDVRPLYSRRLPKGVKHLKDFPILPGEIFKYKWTVTVEDGPTKSDPRCLTRYYSSFVNMERDLASGLIGPLLICYKESVDQRGNQIMSDKRNVILFSVFDENRSWYLTENIQRFLPNPAGVQLEDPEFQASNIMHSINGYVFDSLQLSVCLHEVAYWYILSIGAQTDFLSVFFSGYTFKHKMVYEDTLTLFPFSGETVFMSMENPGLWILGCHNSDFRNRGMTALLKVSSCDKNTGDYYEDSYEDISAYLLSKNNAIEPRSFSQNGAPGSPAGSPTSTEEGTSESATPESGPGSEPATSGSETPASSPPVLKRHQAEITRTTLQSDQEEIDYDDTISVEMKKEDFDIYDEDENQSPRSFQKKTRHYFIAAVERLWDYGMSSSPHVLRNRAQSGSVPQFKKVVFQEFTDGSFTQPLYRGELNEHLGLLGPYIRAEVEDNIMVTFRNQASRPYSFYSSLISYEEDQRQGAEPRKNFVKPNETKTYFWKVQHHMAPTKDEFDCKAWAYFSDVDLEKDVHSGLIGPLLVCHTNTLNPAHGRQVTVQEFALFFTIFDETKSWYFTENMERNCRGAPGTPGSGTASSSPGASPGTSSTGSPGASPGTSSTGSPGASPGTSSTGSPGSSPSASTGTGPGTPGSGTASSSPGASPGTSSTGSPGASPGTSSTGSPGASPGTSSTGSPGSSTPSGATGSPGSSTPSGATGSPGASPGTSSTGSPASSAPCNIQMEDPTFKENYRFHAINGYIMDTLPGLVMAQDQRIRWYLLSMGSNENIHSIHFSGHVFTVRKKEEYKMALYNLYPGVFETVEMLPSKAGIWRVECLIGEHLHAGMSTLFLVYSNKCQTPLGMASGHIRDFQITASGQYGQWAPKLARLHYSGSINAWSTKEPFSWIKVDLLAPMIIHGIKTQGARQKFSSLYISQFIIMYSLDGKKWQTYRGNSTGTLMVFFGNVDSSGIKHNIFNPPIIARYIRLHPTHYSIRSTLRMELMGCDLNSCSMPLGMESKAISDAQITASSYFTNMFATWSPSKARLHLQGRSNAWRPQVNNPKEWLQVDFQKTMKVTGVTTQGVKSLLTSMYVKEFLISSSQDGHQWTLFFQNGKVKVFQGNQDSFTPVVNSLDPPLLTRYLRIHPQSWVHQIALRMEVLGCEAQDLYGAPPGASPGTSSTGSPGASPGTSSTGSPGTPGSGTASSSPGSSTPSGATGSPGTPGSGTASSSPGSSTPSGATGSPGTPGSGTASSSPGSSTPSGATGSPGSSTPSGATGSPGSSPSASTGTGPGSSPSASTGTGPGASPGTSSTGSPGTPGSGTASSSPGSSTPSGATGSPGSSPSASTGTGPGSSPSASTGTGPGASPGTSSTGSPGASPGTSSTGSPGSSTPSGATGSPGSSPSASTGTGPGASPGTSSTGSPGSSPSASTGTGPGTPGSGTASSSPGSSTPSGATGSASSEQKLISEEDLSPATGHHHHHH

SEQ ID NO: 1460 - DNA, 5838 bp, synthetic construct
  misc_feature 1..5838: note = Description of Artificial Sequence: Synthetic polynucleotide
  source 1..5838: mol_type = other DNA
gccaccagaagatactacctgggtgcagtggaactgtcatgggactatatgcaaagtgatctcggtgagctgcctgtggacgcaagatttcctcctagagtgccaaaatcttttccattcaacacctcagtcgtgtacaaaaagactctgtttgtagaattcacggatcaccttttcaacatcgctaagccaaggccaccctggatgggtctgctaggtcctaccatccaggctgaggtttatgatacagtggtcattacacttaagaacatggcttcccatcctgtcagtcttcatgctgttggtgtatcctactggaaagcttctgagggagctgaatatgatgatcagaccagtcaaagggagaaagaagatgataaagtcttccctggtggaagccatacatatgtctggcaggtcctgaaagagaatggtccaatggcctctgacccactgtgccttacctactcatatctttctcatgtggacctggtaaaagacttgaattcaggcctcattggagccctactagtatgtagagaagggagtctggccaaggaaaagacacagaccttgcacaaatttatactactttttgctgtatttgatgaagggaaaagttggcactcagaaacaaagaactccttgatgcaggatagggatgctgcatctgctcgggcctggcctaaaatgcacacagtcaatggttatgtaaacaggtctctgccaggtctgattggatgccacaggaaatcagtctattggcatgtgattggaatgggcaccactcctgaagtgcactcaatattcctcgaaggtcacacatttcttgtgaggaaccatcgccaggctagcttggaaatctcgccaataactttccttactgctcaaacactcttgatggaccttggacagtttctactgttttgtcatatctcttcccaccaacatgatggcatggaagcttatgtcaaagtagacagctgtccagaggaaccccaactacgaatgaaaaataatgaagaagcggaagactatgatgatgatcttactgattctgaaatggatgtggtcaggtttgatgatgacaactctccttcctttatccaaattcgctcagttgccaagaagcatcctaaaacttgggtacattacattgctgctgaagaggaggactgggactatgctcccttagtcctcgcccccgatgacagaagttataaaagtcaatatttgaacaatggccctcagcggattggtaggaagtacaaaaaagtccgatttatggcatacacagatgaaacctttaagactcgtgaagctattcagcatgaatcaggaatcttgggacctttactttatggggaagttggagacacactgttgattatatttaagaatcaagcaagcagaccatataacatctaccctcacggaatcactgatgtccgtcctttgtattcaaggagattaccaaaaggtgtaaaacatttgaaggattttccaattctgccaggagaaatattcaaatataaatggacagtgactgtagaagatgggccaactaaatcagatcctcggtgcctgacccgctattactctagtttcgttaatatggagagagatctagcttcaggactcattggccctctcctcatctgctacaaagaatctgtagatcaaagaggaaaccagataatgtcagacaagaggaatgtcatcctgttttctgtatttgatgagaaccgaagctggtacctcacagagaatatacaacgctttctccccaatccagctggagtgcagcttgaggatccagagttccaagcctccaacatcatgcacagcatcaatggctatgtttttgatagtttgcagttgtcagtttgtttgcatgaggtggcatactggtacattctaagcattggagcacagactgacttcctttctgtcttcttctctggatataccttcaaacacaaaatggtctatgaagacacactcaccctattcccattctcaggagaaactgtcttcatgtcgatggaaaacccaggtctatggattctggggtgccacaactcagactttcggaacagaggcatgaccgccttactgaaggtttctagttgtgacaagaacactggtgattattacgaggacagttatgaagatatttcagcatacttgctgagtaaaaacaatgccattgaaccaagaagcttctctcaaaacggcgcgccaggttctcctgctggctcccccacctcaacagaagaggggacaagcgaaagcgctacgcctgagagtggccctggctctgagccagccacctccggctctgaaacccctgcctcgagcccaccagtcttgaaacgccatcaagctgaaataactcgtactactcttcagtcagatcaagaggaaatcgattatgatgataccatatcagttgaaatgaagaaggaagattttgacatttatgatgaggatgaaaatcagagcccccgcagctttcaaaagaaaacacgacactattttattgctgcagtggagaggctctgggattatgggatgagtagctccccacatgttctaagaaacagggctcagagtggcagtgtccctcagttcaagaaagttgttttccaggaatttactgatggctcctttactcagcccttataccgtggagaactaaatgaacatttgggactcctggggccatatataagagcagaagttgaagataatatcatggtaactttcagaaatcaggcctctcgtccctattccttctattctagccttatttcttatgaggaagatcagaggcaaggagcagaacctagaaaaaactttgtcaagcctaatgaaaccaaaacttacttttggaaagtgcaacatcatatggcacccactaaagatgagtttgactgcaaagcctgggcttatttctctgatgttgacctggaaaaagatgtgcactcaggcctgattggaccccttctggtctgccacactaacacactgaaccctgctcatgggagacaagtgacagtacaggaatttgctctgtttttcaccatctttgatgagaccaaaagctggtacttcactgaaaatatggaaagaaactgcaggggcgcgccaggtacacccggatcgggtacagcgtcatcgagccccggtgcgtcacctggtacgtcgagcacggggtcgccaggggcgtcccctgggacgtcctcaacaggctcgcccggtgcgtcacccggcacgtcgtccacgggttcacctggtagctccccttccgcgtccactggcaccgggcctggaactccggggagcggcacagcgagctcgtcgccgggagcatcgcctgggacatcgagcaccgggtcgccaggagcatcgcccggaacatccagcacaggaagccccggcgcgtcgcccgggacatcaagcacaggttccccgggatcgagcacgccgtccggagccactggatcaccagggagctcgacaccttccggcgcaacgggatcgcccggagccagcccgggtacgtcaagcactggctcccctgcctcgagcgctccctgcaatatccagatggaagatcccacttttaaagagaattatcgcttccatgcaatcaatggctacataatggatacactacctggcttagtaatggctcaggatcaaaggattcgatggtatctgctcagcatgggcagcaatgaaaacatccattctattcatttcagtggacatgtgttcactgtacgaaaaaaagaggagtataaaatggcactgtacaatctctatccaggtgtttttgagacagtggaaatgttaccatccaaagctggaatttggcgggtggaatgccttattggcgagcatctacatgctgggatgagcacactttttctggtgtacagcaataagtgtcagactcccctgggaatggcttctggacacattagagattttcagattacagcttcaggacaatatggacagtgggccccaaagctggccagacttcattattccggatcaatcaatgcctggagcaccaaggagcccttttcttggatcaaggtggatctgttggcaccaatgattattcacggcatcaagacccagggtgcccgtcagaagttctccagcctctacatctctcagtttatcatcatgtatagtcttgatgggaagaagtggcagacttatcgaggaaattccactggaaccttaatggtcttctttggcaatgtggattcatctgggataaaacacaatatttttaaccctccaattattgctcgatacatccgtttgcacccaactcattatagcattcgcagcactcttcgcatggagttgatgggctgtgatttaaatagttgcagcatgccattgggaatggagagtaaagcaatatcagatgcacagattactgcttcatcctactttaccaatatgtttgccacctggtctccttcaaaagctcgacttcacctccaagggaggagtaatgcctggagacctcaggtgaataatccaaaagagtggctgcaagtggacttccagaagacaatgaaagtcacaggagtaactactcagggagtaaaatctctgcttaccagcatgtatgtgaaggagttcctcatctccagcagtcaagatggccatcagtggactctcttttttcagaatggcaaagtaaaggtttttcagggaaatcaagactccttcacacctgtggtgaactctctagacccaccgttactgactcgctaccttcgaattcacccccagagttgggtgcaccagattgccctgaggatggaggttctgggctgcgaggcacaggacctctacggcgcgccaccgggagcgtcacccggtacgtcctcaacggggagccctggggcatcacccggcacgtcctcgacagggtcccccggaacaccgggttcggggactgcgtcgtcgtcacccggttcgtcaacacccagcggtgcgacgggttccccgggaacccccggatcaggaacagcgtcgtcgagccccggaagctcgaccccgtcaggagcgaccgggtcgccaggaacgcctgggtcgggtactgcctcatcgtcgccgggttcatcgacgccctccggagcaacaggttcacccgggtcgtccacccccagcggagcgactggatcaccgggatcgagcccgtcggcatcgacaggaacaggtcccggtagctccccatcggcctccacggggacggggcctggtgcgtcaccggggacaagcagcacgggttcgccgggaacgccagggtcagggaccgcgtcgtcgagcccagggtcgtccaccccaagcggggctactgggtccccgggtagctcgccgagcgcatcaacgggaaccggaccgggcagctccccctcagcgtcgacagggacaggccctggcgcgagcccgggaacatcgtcgacggggtcacccggagcatcgccagggacctcgtcaactggctcgcctggatcgtcaacgccctcgggagccacggggtcgcccggatcatccccgtccgcctcaactggcacaggccctggtgcttcccctggaacgtccagcacaggctcccccggttccagcccttccgcttcgactgggactggacccggaaccccgggatcggggacagcgtcaagctcgcccggaagctccacgccttcgggggcaaccgggtcagcctcgagcgaacaaaaactcatctcagaagaggatctgtcacctgcaaccggtcatcatcaccatcaccattga

SEQ ID NO: 1461 - protein, 2089 aa, synthetic construct
  REGION 1..2089: note = Description of Artificial Sequence: Synthetic polypeptide
ATRRYYLGAVELSWDYMQSDLGELPVDARFPPRVPKSFPFNTSVVYKKTLFVEFTDHLFNIAKPRPPWMGLLGPTIQAEVYDTVVITLKNMASHPVSLHAVGVSYWKASEGAEYDDQTSQREKEDDKVFPGGSHTYVWQVLKENGPMASDPLCLTYSYLSHVDLVKDLNSGLIGALLVCREGSLAKEKTQTLHKFILLFAVFDEGKSWHSETKNSLMQDRDAASARAWPKMHTVNGYVNRSLPGLIGCHRKSVYWHVIGMGTTPEVHSIFLEGHTFLVRNHRQASLEISPITFLTAQTLLMDLGQFLLFCHISSHQHDGMEAYVKVDSCPEEPQLRMKNNEEAEDYDDDLTDSEMDVVRFDDDNSPSFIQIRSVAKKHPKTWVHYIAAEEEDWDYAPLVLAPDDRSYKSQYLNNGPQRIGRKYKKVRFMAYTDETFKTREAIQHESGILGPLLYGEVGDTLLIIFKNQASRPYNIYPHGITDVRPLYSRRLPKGVKHLKDFPILPGEIFKYKWTVTVEDGPTKSDPRCLTRYYSSFVNMERDLASGLIGPLLICYKESVDQRGNQIMSDKRNVILFSVFDENRSWYLTENIQRFLPNPAGVQLEDPEFQASNIMHSINGYVFDSLQLSVCLHEVAYWYILSIGAQTDFLSVFFSGYTFKHKMVYEDTLTLFPFSGETVFMSMENPGLWILGCHNSDFRNRGMTALLKVSSCDKNTGDYYEDSYEDISAYLLSKNNAIEPRSFSQNGAPGSPAGSPTSTEEGTSESATPESGPGSEPATSGSETPASSPPVLKRHQAEITRTTLQSDQEEIDYDDTISVEMKKEDFDIYDEDENQSPRSFQKKTRHYFIAAVERLWDYGMSSSPHVLRNRAQSGSVPQFKKVVFQEFTDGSFTQPLYRGELNEHLGLLGPYIRAEVEDNIMVTFRNQASRPYSFYSSLISYEEDQRQGAEPRKNFVKPNETKTYFWKVQHHMAPTKDEFDCKAWAYFSDVDLEKDVHSGLIGPLLVCHTNTLNPAHGRQVTVQEFALFFTIFDETKSWYFTENMERNCRGAPGTPGSGTASSSPGSSTPSGATGSPGSSTPSGATGSPGSSTPSGATGSPGSSPSASTGTGPGASPGTSSTGSPGASPGTSSTGSPGTPGSGTASSSPGASPGTSSTGSPGASPGTSSTGSPGASPGTSSTGSPGASPGTSSTGSPGTPGSGTASSSPGSSTPSGATGSPGTPGSGTASSSPGSSTPSGATGSPGTPGSGTASSSPGSSTPSGATGSPGSSTPSGATGSPGSSPSASTGTGPGSSPSASTGTGPGASPGTSSTGSPGTPGSGTASSSPGSSTPSGATGSPASSAPCNIQMEDPTFKENYRFHAINGYIMDTLPGLVMAQDQRIRWYLLSMGSNENIHSIHFSGHVFTVRKKEEYKMALYNLYPGVFETVEMLPSKAGIWRVECLIGEHLHAGMSTLFLVYSNKCQTPLGMASGHIRDFQITASGQYGQWAPKLARLHYSGSINAWSTKEPFSWIKVDLLAPMIIHGIKTQGARQKFSSLYISQFIIMYSLDGKKWQTYRGNSTGTLMVFFGNVDSSGIKHNIFNPPIIARYIRLHPTHYSIRSTLRMELMGCDLNSCSMPLGMESKAISDAQITASSYFTNMFATWSPSKARLHLQGRSNAWRPQVNNPKEWLQVDFQKTMKVTGVTTQGVKSLLTSMYVKEFLISSSQDGHQWTLFFQNGKVKVFQGNQDSFTPVVNSLDPPLLTRYLRIHPQSWVHQIALRMEVLGCEAQDLYGAPPGASPGTSSTGSPGASPGTSSTGSPGTPGSGTASSSPGSSTPSGATGSPGTPGSGTASSSPGSSTPSGATGSPGTPGSGTASSSPGSSTPSGATGSPGSSTPSGATGSPGSSPSASTGTGPGSSPSASTGTGPGASPGTSSTGSPGTPGSGTASSSPGSSTPSGATGSPGSSPSASTGTGPGSSPSASTGTGPGASPGTSSTGSPGASPGTSSTGSPGSSTPSGATGSPGSSPSASTGTGPGASPGTSSTGSPGSSPSASTGTGPGTPGSGTASSSPGSSTPSGATGSASSEQKLISEEDLSPATGHHHHHH

SEQ ID NO: 1462 - DNA, 6270 bp, synthetic construct
  misc_feature 1..6270: note = Description of Artificial Sequence: Synthetic polynucleotide
  source 1..6270: mol_type = other DNA
gccaccagaagatactacctgggtgcagtggaactgtcatgggactatatgcaaagtgatctcggtgagctgcctgtggacgcaagatttcctcctagagtgccaaaatcttttccattcaacacctcagtcgtgtacaaaaagactctgtttgtagaattcacggatcaccttttcaacatcgctaagccaaggccaccctggatgggtctgctaggtcctaccatccaggctgaggtttatgatacagtggtcattacacttaagaacatggcttcccatcctgtcagtcttcatgctgttggtgtatcctactggaaagcttctgagggagctgaatatgatgatcagaccagtcaaagggagaaagaagatgataaagtcttccctggtggaagccatacatatgtctggcaggtcctgaaagagaatggtccaatggcctctgacccactgtgccttacctactcatatctttctcatgtggacctggtaaaagacttgaattcaggcctcattggagccctactagtatgtagagaagggagtctggccaaggaaaagacacagaccttgcacaaatttatactactttttgctgtatttgatgaagggaaaagttggcactcagaaacaaagaactccttgatgcaggatagggatgctgcatctgctcgggcctggcctaaaatgcacacagtcaatggttatgtaaacaggtctctgccaggtctgattggatgccacaggaaatcagtctattggcatgtgattggaatgggcaccactcctgaagtgcactcaatattcctcgaaggtcacacatttcttgtgaggaaccatcgccaggctagcttggaaatctcgccaataactttccttactgctcaaacactcttgatggaccttggacagtttctactgttttgtcatatctcttcccaccaacatgatggcatggaagcttatgtcaaagtagacagctgtccagaggaaccccaactacgaatgaaaaataatgaagaagcggaagactatgatgatgatcttactgattctgaaatggatgtggtcaggtttgatgatgacaactctccttcctttatccaaattcgctcagttgccaagaagcatcctaaaacttgggtacattacattgctgctgaagaggaggactgggactatgctcccttagtcctcgcccccgatgacagaagttataaaagtcaatatttgaacaatggccctcagcggattggtaggaagtacaaaaaagtccgatttatggcatacacagatgaaacctttaagactcgtgaagctattcagcatgaatcaggaatcttgggacctttactttatggggaagttggagacacactgttgattatatttaagaatcaagcaagcagaccatataacatctaccctcacggaatcactgatgtccgtcctttgtattcaaggagattaccaaaaggtgtaaaacatttgaaggattttccaattctgccaggagaaatattcaaatataaatggacagtgactgtagaagatgggccaactaaatcagatcctcggtgcctgacccgctattactctagtttcgttaatatggagagagatctagcttcaggactcattggccctctcctcatctgctacaaagaatctgtagatcaaagaggaaaccagataatgtcagacaagaggaatgtcatcctgttttctgtatttgatgagaaccgaagctggtacctcacagagaatatacaacgctttctccccaatccagctggagtgcagcttgaggatccagagttccaagcctccaacatcatgcacagcatcaatggctatgtttttgatagtttgcagttgtcagtttgtttgcatgaggtggcatactggtacattctaagcattggagcacagactgacttcctttctgtcttcttctctggatataccttcaaacacaaaatggtctatgaagacacactcaccctattcccattctcaggagaaactgtcttcatgtcgatggaaaacccaggtctatggattctggggtgccacaactcagactttcggaacagaggcatgaccgccttactgaaggtttctagttgtgacaagaacactggtgattattacgaggacagttatgaagatatttcagcatacttgctgagtaaaaacaatgccattgaaccaagaagcttctctcaaaacggcgcgccaggttctcctgctggctcccccacctcaacagaagaggggacaagcgaaagcgctacgcctgagagtggccctggctctgagccagccacctccggctctgaaacccctgcctcgagcccaccagtcttgaaacgccatcaagctgaaataactcgtactactcttcagtcagatcaagaggaaatcgattatgatgataccatatcagttgaaatgaagaaggaagattttgacatttatgatgaggatgaaaatcagagcccccgcagctttcaaaagaaaacacgacactattttattgctgcagtggagaggctctgggattatgggatgagtagctccccacatgttctaagaaacagggctcagagtggcagtgtccctcagttcaagaaagttgttttccaggaatttactgatggctcctttactcagcccttataccgtggagaactaaatgaacatttgggactcctggggccatatataagagcagaagttgaagataatatcatggtaactttcagaaatcaggcctctcgtccctattccttctattctagccttatttcttatgaggaagatcagaggcaaggagcagaacctagaaaaaactttgtcaagcctaatgaaaccaaaacttacttttggaaagtgcaacatcatatggcacccactaaagatgagtttgactgcaaagcctgggcttatttctctgatgttgacctggaaaaagatgtgcactcaggcctgattggaccccttctggtctgccacactaacacactgaaccctgctcatgggagacaagtgacagtacaggaatttgctctgtttttcaccatctttgatgagaccaaaagctggtacttcactgaaaatatggaaagaaactgcaggggcgcgccaggtacgcccgggtcgggaacagcgtcctcaagcccgggtagctcgacgccgtcaggagccacagggtcgccgggatcgtcgactccatcaggcgcaacgggatcgcctggatcaagcactccatccggagcgacgggaagcccagggagctccccgtccgcatcgactgggacgggacctggagcaagccccggtacgtcgtcaacaggttcgcctggtgcctcgcctggcacgtccagcacggggagccccggaacgccgggttccggaaccgcatcctcctcaccaggtgcctcaccgggcacctcatcaacgggatcaccaggggcttcaccgggaacgagctcgacgggttcaccgggagcgtccccggggacttcgtcgacaggtagcccaggggcaagccccggtacatcgtcaacgggttccccagggacaccggggagcggtactgcatcgtcctcacccggttcctcgacacccagcggagccacgggttcgcccggtactccggggtccggaacggccagcagctcacccggttcctcgacgccatcaggtgccacgggctcgcctggaacgccaggctcgggcactgcgagcagcagccctggatcatcaacgcctagcggagcgaccggctcccctggatcgtcaactccctcgggcgcgactgggagcccaggaagctcaccgtcggcctcgacgggaacagggcctggttcgagcccctcagcttcaacaggaacaggtccaggcgcgtcgccaggtacatcatcgacgggttcgcctgggacccctgggtccggtactgcctcatcatcgcccggatcgtccaccccctcgggagcgacaggttcgcctgcctcgagcgctccctgcaatatccagatggaagatcccacttttaaagagaattatcgcttccatgcaatcaatggctacataatggatacactacctggcttagtaatggctcaggatcaaaggattcgatggtatctgctcagcatgggcagcaatgaaaacatccattctattcatttcagtggacatgtgttcactgtacgaaaaaaagaggagtataaaatggcactgtacaatctctatccaggtgtttttgagacagtggaaatgttaccatccaaagctggaatttggcgggtggaatgccttattggcgagcatctacatgctgggatgagcacactttttctggtgtacagcaataagtgtcagactcccctgggaatggcttctggacacattagagattttcagattacagcttcaggacaatatggacagtgggccccaaagctggccagacttcattattccggatcaatcaatgcctggagcaccaaggagcccttttcttggatcaaggtggatctgttggcaccaatgattattcacggcatcaagacccagggtgcccgtcagaagttctccagcctctacatctctcagtttatcatcatgtatagtcttgatgggaagaagtggcagacttatcgaggaaattccactggaaccttaatggtcttctttggcaatgtggattcatctgggataaaacacaatatttttaaccctccaattattgctcgatacatccgtttgcacccaactcattatagcattcgcagcactcttcgcatggagttgatgggctgtgatttaaatagttgcagcatgccattgggaatggagagtaaagcaatatcagatgcacagattactgcttcatcctactttaccaatatgtttgccacctggtctccttcaaaagctcgacttcacctccaagggaggagtaatgcctggagacctcaggtgaataatccaaaagagtggctgcaagtggacttccagaagacaatgaaagtcacaggagtaactactcagggagtaaaatctctgcttaccagcatgtatgtgaaggagttcctcatctccagcagtcaagatggccatcagtggactctcttttttcagaatggcaaagtaaaggtttttcagggaaatcaagactccttcacacctgtggtgaactctctagacccaccgttactgactcgctaccttcgaattcacccccagagttgggtgcaccagattgccctgaggatggaggttctgggctgcgaggcacaggacctctacggcgcgccaccgggagcgtcacccggtacgtcctcaacggggagccctggggcatcacccggcacgtcctcgacagggtcccccggaacaccgggttcggggactgcgtcgtcgtcacccggttcgtcaacacccagcggtgcgacgggttccccgggaacccccggatcaggaacagcgtcgtcgagccccggaagctcgaccccgtcaggagcgaccgggtcgccaggaacgcctgggtcgggtactgcctcatcgtcgccgggttcatcgacgccctccggagcaacaggttcacccgggtcgtccacccccagcggagcgactggatcaccgggatcgagcccgtcggcatcgacaggaacaggtcccggtagctccccatcggcctccacggggacggggcctggtgcgtcaccggggacaagcagcacgggttcgccgggaacgccagggtcagggaccgcgtcgtcgagcccagggtcgtccaccccaagcggggctactgggtccccgggtagctcgccgagcgcatcaacgggaaccggaccgggcagctccccctcagcgtcgacagggacaggccctggcgcgagcccgggaacatcgtcgacggggtcacccggagcatcgccagggacctcgtcaactggctcgcctggatcgtcaacgccctcgggagccacggggtcgcccggatcatccccgtccgcctcaactggcacaggccctggtgcttcccctggaacgtccagcacaggctcccccggttccagcccttccgcttcgactgggactggacccggaaccccgggatcggggacagcgtcaagctcgcccggaagctccacgccttcgggggcaaccgggtcagcctcgagcgaacaaaaactcatctcagaagaggatctgtcacctgcaaccggtcatcatcaccatcaccattga

SEQ ID NO: 1463 - protein, 1945 aa, synthetic construct
  REGION 1..1945: note = Description of Artificial Sequence: Synthetic polypeptide
ATRRYYLGAVELSWDYMQSDLGELPVDARFPPRVPKSFPFNTSVVYKKTLFVEFTDHLFNIAKPRPPWMGLLGPTIQAEVYDTVVITLKNMASHPVSLHAVGVSYWKASEGAEYDDQTSQREKEDDKVFPGGSHTYVWQVLKENGPMASDPLCLTYSYLSHVDLVKDLNSGLIGALLVCREGSLAKEKTQTLHKFILLFAVFDEGKSWHSETKNSLMQDRDAASARAWPKMHTVNGYVNRSLPGLIGCHRKSVYWHVIGMGTTPEVHSIFLEGHTFLVRNHRQASLEISPITFLTAQTLLMDLGQFLLFCHISSHQHDGMEAYVKVDSCPEEPQLRMKNNEEAEDYDDDLTDSEMDVVRFDDDNSPSFIQIRSVAKKHPKTWVHYIAAEEEDWDYAPLVLAPDDRSYKSQYLNNGPQRIGRKYKKVRFMAYTDETFKTREAIQHESGILGPLLYGEVGDTLLIIFKNQASRPYNIYPHGITDVRPLYSRRLPKGVKHLKDFPILPGEIFKYKWTVTVEDGPTKSDPRCLTRYYSSFVNMERDLASGLIGPLLICYKESVDQRGNQIMSDKRNVILFSVFDENRSWYLTENIQRFLPNPAGVQLEDPEFQASNIMHSINGYVFDSLQLSVCLHEVAYWYILSIGAQTDFLSVFFSGYTFKHKMVYEDTLTLFPFSGETVFMSMENPGLWILGCHNSDFRNRGMTALLKVSSCDKNTGDYYEDSYEDISAYLLSKNNAIEPRSFSQNGAPGTPGSGTASSSPGSSTPSGATGSPGASPGTSSTGSPGTPGSGTASSSPGSSTPSGATGSPGSSPSASTGTGPGSSPSASTGTGPGSSTPSGATGSPGSSTPSGATGSPGASPGTSSTGSPGASPGTSSTGSPGASPGTSSTGSPASSPPVLKRHQAEITRTTLQSDQEEIDYDDTISVEMKKEDFDIYDEDENQSPRSFQKKTRHYFIAAVERLWDYGMSSSPHVLRNRAQSGSVPQFKKVVFQEFTDGSFTQPLYRGELNEHLGLLGPYIRAEVEDNIMVTFRNQASRPYSFYSSLISYEEDQRQGAEPRKNFVKPNETKTYFWKVQHHMAPTKDEFDCKAWAYFSDVDLEKDVHSGLIGPLLVCHTNTLNPAHGRQVTVQEFALFFTIFDETKSWYFTENMERNCRGAPGSPAGSPTSTEEGTSESATPESGPGSEPATSGSETPASSAPCNIQMEDPTFKENYRFHAINGYIMDTLPGLVMAQDQRIRWYLLSMGSNENIHSIHFSGHVFTVRKKEEYKMALYNLYPGVFETVEMLPSKAGIWRVECLIGEHLHAGMSTLFLVYSNKCQTPLGMASGHIRDFQITASGQYGQWAPKLARLHYSGSINAWSTKEPFSWIKVDLLAPMIIHGIKTQGARQKFSSLYISQFIIMYSLDGKKWQTYRGNSTGTLMVFFGNVDSSGIKHNIFNPPIIARYIRLHPTHYSIRSTLRMELMGCDLNSCSMPLGMESKAISDAQITASSYFTNMFATWSPSKARLHLQGRSNAWRPQVNNPKEWLQVDFQKTMKVTGVTTQGVKSLLTSMYVKEFLISSSQDGHQWTLFFQNGKVKVFQGNQDSFTPVVNSLDPPLLTRYLRIHPQSWVHQIALRMEVLGCEAQDLYGAPPGASPGTSSTGSPGASPGTSSTGSPGTPGSGTASSSPGSSTPSGATGSPGTPGSGTASSSPGSSTPSGATGSPGTPGSGTASSSPGSSTPSGATGSPGSSTPSGATGSPGSSPSASTGTGPGSSPSASTGTGPGASPGTSSTGSPGTPGSGTASSSPGSSTPSGATGSPGSSPSASTGTGPGSSPSASTGTGPGASPGTSSTGSPGASPGTSSTGSPGSSTPSGATGSPGSSPSASTGTGPGASPGTSSTGSPGSSPSASTGTGPGTPGSGTASSSPGSSTPSGATGSASSEQKLISEEDLSPATGHHHHHH

SEQ ID NO: 1464 - DNA, 5838 bp, synthetic construct
  misc_feature 1..5838: note = Description of Artificial Sequence: Synthetic polynucleotide
  source 1..5838: mol_type = other DNA
gccaccagaagatactacctgggtgcagtggaactgtcatgggactatatgcaaagtgatctcggtgagctgcctgtggacgcaagatttcctcctagagtgccaaaatcttttccattcaacacctcagtcgtgtacaaaaagactctgtttgtagaattcacggatcaccttttcaacatcgctaagccaaggccaccctggatgggtctgctaggtcctaccatccaggctgaggtttatgatacagtggtcattacacttaagaacatggcttcccatcctgtcagtcttcatgctgttggtgtatcctactggaaagcttctgagggagctgaatatgatgatcagaccagtcaaagggagaaagaagatgataaagtcttccctggtggaagccatacatatgtctggcaggtcctgaaagagaatggtccaatggcctctgacccactgtgccttacctactcatatctttctcatgtggacctggtaaaagacttgaattcaggcctcattggagccctactagtatgtagagaagggagtctggccaaggaaaagacacagaccttgcacaaatttatactactttttgctgtatttgatgaagggaaaagttggcactcagaaacaaagaactccttgatgcaggatagggatgctgcatctgctcgggcctggcctaaaatgcacacagtcaatggttatgtaaacaggtctctgccaggtctgattggatgccacaggaaatcagtctattggcatgtgattggaatgggcaccactcctgaagtgcactcaatattcctcgaaggtcacacatttcttgtgaggaaccatcgccaggctagcttggaaatctcgccaataactttccttactgctcaaacactcttgatggaccttggacagtttctactgttttgtcatatctcttcccaccaacatgatggcatggaagcttatgtcaaagtagacagctgtccagaggaaccccaactacgaatgaaaaataatgaagaagcggaagactatgatgatgatcttactgattctgaaatggatgtggtcaggtttgatgatgacaactctccttcctttatccaaattcgctcagttgccaagaagcatcctaaaacttgggtacattacattgctgctgaagaggaggactgggactatgctcccttagtcctcgcccccgatgacagaagttataaaagtcaatatttgaacaatggccctcagcggattggtaggaagtacaaaaaagtccgatttatggcatacacagatgaaacctttaagactcgtgaagctattcagcatgaatcaggaatcttgggacctttactttatggggaagttggagacacactgttgattatatttaagaatcaagcaagcagaccatataacatctaccctcacggaatcactgatgtccgtcctttgtattcaaggagattaccaaaaggtgtaaaacatttgaaggattttccaattctgccaggagaaatattcaaatataaatggacagtgactgtagaagatgggccaactaaatcagatcctcggtgcctgacccgctattactctagtttcgttaatatggagagagatctagcttcaggactcattggccctctcctcatctgctacaaagaatctgtagatcaaagaggaaaccagataatgtcagacaagaggaatgtcatcctgttttctgtatttgatgagaaccgaagctggtacctcacagagaatatacaacgctttctccccaatccagctggagtgcagcttgaggatccagagttccaagcctccaacatcatgcacagcatcaatggctatgtttttgatagtttgcagttgtcagtttgtttgcatgaggtggcatactggtacattctaagcattggagcacagactgacttcctttctgtcttcttctctggatataccttcaaacacaaaatggtctatgaagacacactcaccctattcccattctcaggagaaactgtcttcatgtcgatggaaaacccaggtctatggattctggggtgccacaactcagactttcggaacagaggcatgaccgccttactgaaggtttctagttgtgacaagaacactggtgattattacgaggacagttatgaagatatttcagcatacttgctgagtaaaaacaatgccattgaaccaagaagcttctctcaaaacggcgcgccaggtacaccgggcagcggcacggcttcgtcgtcacccggctcgtccacaccgtcgggagctacgggaagcccaggagcgtcaccgggaacgtcgtcaacggggtcaccgggtacgccaggtagcggcacggccagcagctcgccaggttcatcgaccccgtcgggagcgactgggtcgcccggatcaagcccgtcagcttccactggaacaggacccgggtcgtcgccgtcagcctcaacggggacaggacctggttcatcgacgccgtcaggggcgacaggctcgcccggatcgtcaacaccctcgggggcaacggggagccctggtgcgtcgcctggaacctcatccaccggaagcccgggggcctcgccgggtacgagctccacgggatcgcccggagcgtcccccggaacttcaagcacagggagccctgcctcgagcccaccagtcttgaaacgccatcaagctgaaataactcgtactactcttcagtcagatcaagaggaaatcgattatgatgataccatatcagttgaaatgaagaaggaagattttgacatttatgatgaggatgaaaatcagagcccccgcagctttcaaaagaaaacacgacactattttattgctgcagtggagaggctctgggattatgggatgagtagctccccacatgttctaagaaacagggctcagagtggcagtgtccctcagttcaagaaagttgttttccaggaatttactgatggctcctttactcagcccttataccgtggagaactaaatgaacatttgggactcctggggccatatataagagcagaagttgaagataatatcatggtaactttcagaaatcaggcctctcgtccctattccttctattctagccttatttcttatgaggaagatcagaggcaaggagcagaacctagaaaaaactttgtcaagcctaatgaaaccaaaacttacttttggaaagtgcaacatcatatggcacccactaaagatgagtttgactgcaaagcctgggcttatttctctgatgttgacctggaaaaagatgtgcactcaggcctgattggaccccttctggtctgccacactaacacactgaaccctgctcatgggagacaagtgacagtacaggaatttgctctgtttttcaccatctttgatgagaccaaaagctggtacttcactgaaaatatggaaagaaactgcaggggcgcgccaggttctcctgctggctcccccacctcaacagaagaggggacaagcgaaagcgctacgcctgagagtggccctggctctgagccagccacctccggctctgaaacccctgcctcgagcgctccctgcaatatccagatggaagatcccacttttaaagagaattatcgcttccatgcaatcaatggctacataatggatacactacctggcttagtaatggctcaggatcaaaggattcgatggtatctgctcagcatgggcagcaatgaaaacatccattctattcatttcagtggacatgtgttcactgtacgaaaaaaagaggagtataaaatggcactgtacaatctctatccaggtgtttttgagacagtggaaatgttaccatccaaagctggaatttggcgggtggaatgccttattggcgagcatctacatgctgggatgagcacactttttctggtgtacagcaataagtgtcagactcccctgggaatggcttctggacacattagagattttcagattacagcttcaggacaatatggacagtgggccccaaagctggccagacttcattattccggatcaatcaatgcctggagcaccaaggagcccttttcttggatcaaggtggatctgttggcaccaatgattattcacggcatcaagacccagggtgcccgtcagaagttctccagcctctacatctctcagtttatcatcatgtatagtcttgatgggaagaagtggcagacttatcgaggaaattccactggaaccttaatggtcttctttggcaatgtggattcatctgggataaaacacaatatttttaaccctccaattattgctcgatacatccgtttgcacccaactcattatagcattcgcagcactcttcgcatggagttgatgggctgtgatttaaatagttgcagcatgccattgggaatggagagtaaagcaatatcagatgcacagattactgcttcatcctactttaccaatatgtttgccacctggtctccttcaaaagctcgacttcacctccaagggaggagtaatgcctggagacctcaggtgaataatccaaaagagtggctgcaagtggacttccagaagacaatgaaagtcacaggagtaactactcagggagtaaaatctctgcttaccagcatgtatgtgaaggagttcctcatctccagcagtcaagatggccatcagtggactctcttttttcagaatggcaaagtaaaggtttttcagggaaatcaagactccttcacacctgtggtgaactctctagacccaccgttactgactcgctaccttcgaattcacccccagagttgggtgcaccagattgccctgaggatggaggttctgggctgcgaggcacaggacctctacggcgcgccaccgggagcgtcacccggtacgtcctcaacggggagccctggggcatcacccggcacgtcctcgacagggtcccccggaacaccgggttcggggactgcgtcgtcgtcacccggttcgtcaacacccagcggtgcgacgggttccccgggaacccccggatcaggaacagcgtcgtcgagccccggaagctcgaccccgtcaggagcgaccgggtcgccaggaacgcctgggtcgggtactgcctcatcgtcgccgggttcatcgacgccctccggagcaacaggttcacccgggtcgtccacccccagcggagcgactggatcaccgggatcgagcccgtcggcatcgacaggaacaggtcccggtagctccccatcggcctccacggggacggggcctggtgcgtcaccggggacaagcagcacgggttcgccgggaacgccagggtcagggaccgcgtcgtcgagcccagggtcgtccaccccaagcggggctactgggtccccgggtagctcgccgagcgcatcaacgggaaccggaccgggcagctccccctcagcgtcgacagggacaggccctggcgcgagcccgggaacatcgtcgacggggtcacccggagcatcgccagggacctcgtcaactggctcgcctggatcgtcaacgccctcgggagccacggggtcgcccggatcatccccgtccgcctcaactggcacaggccctggtgcttcccctggaacgtccagcacaggctcccccggttccagcccttccgcttcgactgggactggacccggaaccccgggatcggggacagcgtcaagctcgcccggaagctccacgccttcgggggcaaccgggtcagcctcgagcgaacaaaaactcatctcagaagaggatctgtcacctgcaaccggtcatcatcaccatcaccattga

SEQ ID NO: 1465 - protein, 2053 aa, synthetic construct
  REGION 1..2053: note = Description of Artificial Sequence: Synthetic polypeptide
ATRRYYLGAVELSWDYMQSDLGELPVDARFPPRVPKSFPFNTSVVYKKTLFVEFTDHLFNIAKPRPPWMGLLGPTIQAEVYDTVVITLKNMASHPVSLHAVGVSYWKASEGAEYDDQTSQREKEDDKVFPGGSHTYVWQVLKENGPMASDPLCLTYSYLSHVDLVKDLNSGLIGALLVCREGSLAKEKTQTLHKFILLFAVFDEGKSWHSETKNSLMQDRDAASARAWPKMHTVNGYVNRSLPGLIGCHRKSVYWHVIGMGTTPEVHSIFLEGHTFLVRNHRQASLEISPITFLTAQTLLMDLGQFLLFCHISSHQHDGMEAYVKVDSCPEEPQLRMKNNEEAEDYDDDLTDSEMDVVRFDDDNSPSFIQIRSVAKKHPKTWVHYIAAEEEDWDYAPLVLAPDDRSYKSQYLNNGPQRIGRKYKKVRFMAYTDETFKTREAIQHESGILGPLLYGEVGDTLLIIFKNQASRPYNIYPHGITDVRPLYSRRLPKGVKHLKDFPILPGEIFKYKWTVTVEDGPTKSDPRCLTRYYSSFVNMERDLASGLIGPLLICYKESVDQRGNQIMSDKRNVILFSVFDENRSWYLTENIQRFLPNPAGVQLEDPEFQASNIMHSINGYVFDSLQLSVCLHEVAYWYILSIGAQTDFLSVFFSGYTFKHKMVYEDTLTLFPFSGETVFMSMENPGLWILGCHNSDFRNRGMTALLKVSSCDKNTGDYYEDSYEDISAYLLSKNNAIEPRSFSQNGAPGTPGSGTASSSPGSSTPSGATGSPGASPGTSSTGSPGTPGSGTASSSPGSSTPSGATGSPGSSPSASTGTGPGSSPSASTGTGPGSSTPSGATGSPGSSTPSGATGSPGASPGTSSTGSPGASPGTSSTGSPGASPGTSSTGSPASSPPVLKRHQAEITRTTLQSDQEEIDYDDTISVEMKKEDFDIYDEDENQSPRSFQKKTRHYFIAAVERLWDYGMSSSPHVLRNRAQSGSVPQFKKVVFQEFTDGSFTQPLYRGELNEHLGLLGPYIRAEVEDNIMVTFRNQASRPYSFYSSLISYEEDQRQGAEPRKNFVKPNETKTYFWKVQHHMAPTKDEFDCKAWAYFSDVDLEKDVHSGLIGPLLVCHTNTLNPAHGRQVTVQEFALFFTIFDETKSWYFTENMERNCRGAPGTPGSGTASSSPGASPGTSSTGSPGASPGTSSTGSPGASPGTSSTGSPGSSPSASTGTGPGTPGSGTASSSPGASPGTSSTGSPGASPGTSSTGSPGASPGTSSTGSPGSSTPSGATGSPGSSTPSGATGSPGASPGTSSTGSPASSAPCNIQMEDPTFKENYRFHAINGYIMDTLPGLVMAQDQRIRWYLLSMGSNENIHSIHFSGHVFTVRKKEEYKMALYNLYPGVFETVEMLPSKAGIWRVECLIGEHLHAGMSTLFLVYSNKCQTPLGMASGHIRDFQITASGQYGQWAPKLARLHYSGSINAWSTKEPFSWIKVDLLAPMIIHGIKTQGARQKFSSLYISQFIIMYSLDGKKWQTYRGNSTGTLMVFFGNVDSSGIKHNIFNPPIIARYIRLHPTHYSIRSTLRMELMGCDLNSCSMPLGMESKAISDAQITASSYFTNMFATWSPSKARLHLQGRSNAWRPQVNNPKEWLQVDFQKTMKVTGVTTQGVKSLLTSMYVKEFLISSSQDGHQWTLFFQNGKVKVFQGNQDSFTPVVNSLDPPLLTRYLRIHPQSWVHQIALRMEVLGCEAQDLYGAPPGASPGTSSTGSPGASPGTSSTGSPGTPGSGTASSSPGSSTPSGATGSPGTPGSGTASSSPGSSTPSGATGSPGTPGSGTASSSPGSSTPSGATGSPGSSTPSGATGSPGSSPSASTGTGPGSSPSASTGTGPGASPGTSSTGSPGTPGSGTASSSPGSSTPSGATGSPGSSPSASTGTGPGSSPSASTGTGPGASPGTSSTGSPGASPGTSSTGSPGSSTPSGATGSPGSSPSASTGTGPGASPGTSSTGSPGSSPSASTGTGPGTPGSGTASSSPGSSTPSGATGSASSEQKLISEEDLSPATGHHHHHH

SEQ ID NO: 1466 - DNA, 6162 bp, synthetic construct
  misc_feature 1..6162: note = Description of Artificial Sequence: Synthetic polynucleotide
  source 1..6162: mol_type = other DNA
gccaccagaagatactacctgggtgcagtggaactgtcatgggactatatgcaaagtgatctcggtgagctgcctgtggacgcaagatttcctcctagagtgccaaaatcttttccattcaacacctcagtcgtgtacaaaaagactctgtttgtagaattcacggatcaccttttcaacatcgctaagccaaggccaccctggatgggtctgctaggtcctaccatccaggctgaggtttatgatacagtggtcattacacttaagaacatggcttcccatcctgtcagtcttcatgctgttggtgtatcctactggaaagcttctgagggagctgaatatgatgatcagaccagtcaaagggagaaagaagatgataaagtcttccctggtggaagccatacatatgtctggcaggtcctgaaagagaatggtccaatggcctctgacccactgtgccttacctactcatatctttctcatgtggacctggtaaaagacttgaattcaggcctcattggagccctactagtatgtagagaagggagtctggccaaggaaaagacacagaccttgcacaaatttatactactttttgctgtatttgatgaagggaaaagttggcactcagaaacaaagaactccttgatgcaggatagggatgctgcatctgctcgggcctggcctaaaatgcacacagtcaatggttatgtaaacaggtctctgccaggtctgattggatgccacaggaaatcagtctattggcatgtgattggaatgggcaccactcctgaagtgcactcaatattcctcgaaggtcacacatttcttgtgaggaaccatcgccaggctagcttggaaatctcgccaataactttccttactgctcaaacactcttgatggaccttggacagtttctactgttttgtcatatctcttcccaccaacatgatggcatggaagcttatgtcaaagtagacagctgtccagaggaaccccaactacgaatgaaaaataatgaagaagcggaagactatgatgatgatcttactgattctgaaatggatgtggtcaggtttgatgatgacaactctccttcctttatccaaattcgctcagttgccaagaagcatcctaaaacttgggtacattacattgctgctgaagaggaggactgggactatgctcccttagtcctcgcccccgatgacagaagttataaaagtcaatatttgaacaatggccctcagcggattggtaggaagtacaaaaaagtccgatttatggcatacacagatgaaacctttaagactcgtgaagctattcagcatgaatcaggaatcttgggacctttactttatggggaagttggagacacactgttgattatatttaagaatcaagcaagcagaccatataacatctaccctcacggaatcactgatgtccgtcctttgtattcaaggagattaccaaaaggtgtaaaacatttgaaggattttccaattctgccaggagaaatattcaaatataaatggacagtgactgtagaagatgggccaactaaatcagatcctcggtgcctgacccgctattactctagtttcgttaatatggagagagatctagcttcaggactcattggccctctcctcatctgctacaaagaatctgtagatcaaagaggaaaccagataatgtcagacaagaggaatgtcatcctgttttctgtatttgatgagaaccgaagctggtacctcacagagaatatacaacgctttctccccaatccagctggagtgcagcttgaggatccagagttccaagcctccaacatcatgcacagcatcaatggctatgtttttgatagtttgcagttgtcagtttgtttgcatgaggtggcatactggtacattctaagcattggagcacagactgacttcctttctgtcttcttctctggatataccttcaaacacaaaatggtctatgaagacacactcaccctattcccattctcaggagaaactgtcttcatgtcgatggaaaacccaggtctatggattctggggtgccacaactcagactttcggaacagaggcatgaccgccttactgaaggtttctagttgtgacaagaacactggtgattattacgaggacagttatgaagatatttcagcatacttgctgagtaaaaacaatgccattgaaccaagaagcttctctcaaaacggcgcgccaggtacaccgggcagcggcacggcttcgtcgtcacccggctcgtccacaccgtcgggagctacgggaagcccaggagcgtcaccgggaacgtcgtcaacggggtcaccgggtacgccaggtagcggcacggccagcagctcgccaggttcatcgaccccgtcgggagcgactgggtcgcccggatcaagcccgtcagcttccactggaacaggacccgggtcgtcgccgtcagcctcaacggggacaggacctggttcatcgacgccgtcaggggcgacaggctcgcccggatcgtcaacaccctcgggggcaacggggagccctggtgcgtcgcctggaacctcatccaccggaagcccgggggcctcgccgggtacgagctccacgggatcgcccggagcgtcccccggaacttcaagcacagggagccctgcctcgagcccaccagtcttgaaacgccatcaagctgaaataactcgtactactcttcagtcagatcaagaggaaatcgattatgatgataccatatcagttgaaatgaagaaggaagattttgacatttatgatgaggatgaaaatcagagcccccgcagctttcaaaagaaaacacgacactattttattgctgcagtggagaggctctgggattatgggatgagtagctccccacatgttctaagaaacagggctcagagtggcagtgtccctcagttcaagaaagttgttttccaggaatttactgatggctcctttactcagcccttataccgtggagaactaaatgaacatttgggactcctggggccatatataagagcagaagttgaagataatatcatggtaactttcagaaatcaggcctctcgtccctattccttctattctagccttatttcttatgaggaagatcagaggcaaggagcagaacctagaaaaaactttgtcaagcctaatgaaaccaaaacttacttttggaaagtgcaacatcatatggcacccactaaagatgagtttgactgcaaagcctgggcttatttctctgatgttgacctggaaaaagatgtgcactcaggcctgattggaccccttctggtctgccacactaacacactgaaccctgctcatgggagacaagtgacagtacaggaatttgctctgtttttcaccatctttgatgagaccaaaagctggtacttcactgaaaatatggaaagaaactgcaggggcgcgccaggtacacccggatcgggtacagcgtcatcgagccccggtgcgtcacctggtacgtcgagcacggggtcgccaggggcgtcccctgggacgtcctcaacaggctcgcccggtgcgtcacccggcacgtcgtccacgggttcacctggtagctccccttccgcgtccactggcaccgggcctggaactccggggagcggcacagcgagctcgtcgccgggagcatcgcctgggacatcgagcaccgggtcgccaggagcatcgcccggaacatccagcacaggaagccccggcgcgtcgcccgggacatcaagcacaggttccccgggatcgagcacgccgtccggagccactggatcaccagggagctcgacaccttccggcgcaacgggatcgcccggagccagcccgggtacgtcaagcactggctcccctgcctcgagcgctccctgcaatatccagatggaagatcccacttttaaagagaattatcgcttccatgcaatcaatggctacataatggatacactacctggcttagtaatggctcaggatcaaaggattcgatggtatctgctcagcatgggcagcaatgaaaacatccattctattcatttcagtggacatgtgttcactgtacgaaaaaaagaggagtataaaatggcactgtacaatctctatccaggtgtttttgagacagtggaaatgttaccatccaaagctggaatttggcgggtggaatgccttattggcgagcatctacatgctgggatgagcacactttttctggtgtacagcaataagtgtcagactcccctgggaatggcttctggacacattagagattttcagattacagcttcaggacaatatggacagtgggccccaaagctggccagacttcattattccggatcaatcaatgcctggagcaccaaggagcccttttcttggatcaaggtggatctgttggcaccaatgattattcacggcatcaagacccagggtgcccgtcagaagttctccagcctctacatctctcagtttatcatcatgtatagtcttgatgggaagaagtggcagacttatcgaggaaattccactggaaccttaatggtcttctttggcaatgtggattcatctgggataaaacacaatatttttaaccctccaattattgctcgatacatccgtttgcacccaactcattatagcattcgcagcactcttcgcatggagttgatgggctgtgatttaaatagttgcagcatgccattgggaatggagagtaaagcaatatcagatgcacagattactgcttcatcctactttaccaatatgtttgccacctggtctccttcaaaagctcgacttcacctccaagggaggagtaatgcctggagacctcaggtgaataatccaaaagagtggctgcaagtggacttccagaagacaatgaaagtcacaggagtaactactcagggagtaaaatctctgcttaccagcatgtatgtgaaggagttcctcatctccagcagtcaagatggccatcagtggactctcttttttcagaatggcaaagtaaaggtttttcagggaaatcaagactccttcacacctgtggtgaactctctagacccaccgttactgactcgctaccttcgaattcacccccagagttgggtgcaccagattgccctgaggatggaggttctgggctgcgaggcacaggacctctacggcgcgccaccgggagcgtcacccggtacgtcctcaacggggagccctggggcatcacccggcacgtcctcgacagggtcccccggaacaccgggttcggggactgcgtcgtcgtcacccggttcgtcaacacccagcggtgcgacgggttccccgggaacccccggatcaggaacagcgtcgtcgagccccggaagctcgaccccgtcaggagcgaccgggtcgccaggaacgcctgggtcgggtactgcctcatcgtcgccgggttcatcgacgccctccggagcaacaggttcacccgggtcgtccacccccagcggagcgactggatcaccgggatcgagcccgtcggcatcgacaggaacaggtcccggtagctccccatcggcctccacggggacggggcctggtgcgtcaccggggacaagcagcacgggttcgccgggaacgccagggtcagggaccgcgtcgtcgagcccagggtcgtccaccccaagcggggctactgggtccccgggtagctcgccgagcgcatcaacgggaaccggaccgggcagctccccctcagcgtcgacagggacaggccctggcgcgagcccgggaacatcgtcgacggggtcacccggagcatcgccagggacctcgtcaactggctcgcctggatcgtcaacgccctcgggagccacggggtcgcccggatcatccccgtccgcctcaactggcacaggccctggtgcttcccctggaacgtccagcacaggctcccccggttccagcccttccgcttcgactgggactggacccggaaccccgggatcggggacagcgtcaagctcgcccggaagctccacgccttcgggggcaaccgggtcagcctcgagcgaacaaaaactcatctcagaagaggatctgtcacctgcaaccggtcatcatcaccatcaccattga

SEQ ID NO: 1467 - protein, 2197 aa, synthetic construct
  REGION 1..2197: note = Description of Artificial Sequence: Synthetic polypeptide
ATRRYYLGAVELSWDYMQSDLGELPVDARFPPRVPKSFPFNTSVVYKKTLFVEFTDHLFNIAKPRPPWMGLLGPTIQAEVYDTVVITLKNMASHPVSLHAVGVSYWKASEGAEYDDQTSQREKEDDKVFPGGSHTYVWQVLKENGPMASDPLCLTYSYLSHVDLVKDLNSGLIGALLVCREGSLAKEKTQTLHKFILLFAVFDEGKSWHSETKNSLMQDRDAASARAWPKMHTVNGYVNRSLPGLIGCHRKSVYWHVIGMGTTPEVHSIFLEGHTFLVRNHRQASLEISPITFLTAQTLLMDLGQFLLFCHISSHQHDGMEAYVKVDSCPEEPQLRMKNNEEAEDYDDDLTDSEMDVVRFDDDNSPSFIQIRSVAKKHPKTWVHYIAAEEEDWDYAPLVLAPDDRSYKSQYLNNGPQRIGRKYKKVRFMAYTDETFKTREAIQHESGILGPLLYGEVGDTLLIIFKNQASRPYNIYPHGITDVRPLYSRRLPKGVKHLKDFPILPGEIFKYKWTVTVEDGPTKSDPRCLTRYYSSFVNMERDLASGLIGPLLICYKESVDQRGNQIMSDKRNVILFSVFDENRSWYLTENIQRFLPNPAGVQLEDPEFQASNIMHSINGYVFDSLQLSVCLHEVAYWYILSIGAQTDFLSVFFSGYTFKHKMVYEDTLTLFPFSGETVFMSMENPGLWILGCHNSDFRNRGMTALLKVSSCDKNTGDYYEDSYEDISAYLLSKNNAIEPRSFSQNGAPGTPGSGTASSSPGSSTPSGATGSPGASPGTSSTGSPGTPGSGTASSSPGSSTPSGATGSPGSSPSASTGTGPGSSPSASTGTGPGSSTPSGATGSPGSSTPSGATGSPGASPGTSSTGSPGASPGTSSTGSPGASPGTSSTGSPASSPPVLKRHQAEITRTTLQSDQEEIDYDDTISVEMKKEDFDIYDEDENQSPRSFQKKTRHYFIAAVERLWDYGMSSSPHVLRNRAQSGSVPQFKKVVFQEFTDGSFTQPLYRGELNEHLGLLGPYIRAEVEDNIMVTFRNQASRPYSFYSSLISYEEDQRQGAEPRKNFVKPNETKTYFWKVQHHMAPTKDEFDCKAWAYFSDVDLEKDVHSGLIGPLLVCHTNTLNPAHGRQVTVQEFALFFTIFDETKSWYFTENMERNCRGAPGTPGSGTASSSPGSSTPSGATGSPGSSTPSGATGSPGSSTPSGATGSPGSSPSASTGTGPGASPGTSSTGSPGASPGTSSTGSPGTPGSGTASSSPGASPGTSSTGSPGASPGTSSTGSPGASPGTSSTGSPGASPGTSSTGSPGTPGSGTASSSPGSSTPSGATGSPGTPGSGTASSSPGSSTPSGATGSPGTPGSGTASSSPGSSTPSGATGSPGSSTPSGATGSPGSSPSASTGTGPGSSPSASTGTGPGASPGTSSTGSPGTPGSGTASSSPGSSTPSGATGSPASSAPCNIQMEDPTFKENYRFHAINGYIMDTLPGLVMAQDQRIRWYLLSMGSNENIHSIHFSGHVFTVRKKEEYKMALYNLYPGVFETVEMLPSKAGIWRVECLIGEHLHAGMSTLFLVYSNKCQTPLGMASGHIRDFQITASGQYGQWAPKLARLHYSGSINAWSTKEPFSWIKVDLLAPMIIHGIKTQGARQKFSSLYISQFIIMYSLDGKKWQTYRGNSTGTLMVFFGNVDSSGIKHNIFNPPIIARYIRLHPTHYSIRSTLRMELMGCDLNSCSMPLGMESKAISDAQITASSYFTNMFATWSPSKARLHLQGRSNAWRPQVNNPKEWLQVDFQKTMKVTGVTTQGVKSLLTSMYVKEFLISSSQDGHQWTLFFQNGKVKVFQGNQDSFTPVVNSLDPPLLTRYLRIHPQSWVHQIALRMEVLGCEAQDLYGAPPGASPGTSSTGSPGASPGTSSTGSPGTPGSGTASSSPGSSTPSGATGSPGTPGSGTASSSPGSSTPSGATGSPGTPGSGTASSSPGSSTPSGATGSPGSSTPSGATGSPGSSPSASTGTGPGSSPSASTGTGPGASPGTSSTGSPGTPGSGTASSSPGSSTPSGATGSPGSSPSASTGTGPGSSPSASTGTGPGASPGTSSTGSPGASPGTSSTGSPGSSTPSGATGSPGSSPSASTGTGPGASPGTSSTGSPGSSPSASTGTGPGTPGSGTASSSPGSSTPSGATGSASSEQKLISEEDLSPATGHHHHHH

SEQ ID NO: 1468 - DNA, 6594 bp, synthetic construct
  misc_feature 1..6594: note = Description of Artificial Sequence: Synthetic polynucleotide
  source 1..6594: mol_type = other DNA
gccaccagaagatactacctgggtgcagtggaactgtcatgggactatatgcaaagtgatctcggtgagctgcctgtggacgcaagatttcctcctagagtgccaaaatcttttccattcaacacctcagtcgtgtacaaaaagactctgtttgtagaattcacggatcaccttttcaacatcgctaagccaaggccaccctggatgggtctgctaggtcctaccatccaggctgaggtttatgatacagtggtcattacacttaagaacatggcttcccatcctgtcagtcttcatgctgttggtgtatcctactggaaagcttctgagggagctgaatatgatgatcagaccagtcaaagggagaaagaagatgataaagtcttccctggtggaagccatacatatgtctggcaggtcctgaaagagaatggtccaatggcctctgacccactgtgccttacctactcatatctttctcatgtggacctggtaaaagacttgaattcaggcctcattggagccctactagtatgtagagaagggagtctggccaaggaaaagacacagaccttgcacaaatttatactactttttgctgtatttgatgaagggaaaagttggcactcagaaacaaagaactccttgatgcaggatagggatgctgcatctgctcgggcctggcctaaaatgcacacagtcaatggttatgtaaacaggtctctgccaggtctgattggatgccacaggaaatcagtctattggcatgtgattggaatgggcaccactcctgaagtgcactcaatattcctcgaaggtcacacatttcttgtgaggaaccatcgccaggctagcttggaaatctcgccaataactttccttactgctcaaacactcttgatggaccttggacagtttctactgttttgtcatatctcttcccaccaacatgatggcatggaagcttatgtcaaagtagacagctgtccagaggaaccccaactacgaatgaaaaataatgaagaagcggaagactatgatgatgatcttactgattctgaaatggatgtggtcaggtttgatgatgacaactctccttcctttatccaaattcgctcagttgccaagaagcatcctaaaacttgggtacattacattgctgctgaagaggaggactgggactatgctcccttagtcctcgcccccgatgacagaagttataaaagtcaatatttgaacaatggccctcagcggattggtaggaagtacaaaaaagtccgatttatggcatacacagatgaaacctttaagactcgtgaagctattcagcatgaatcaggaatcttgggacctttactttatggggaagttggagacacactgttgattatatttaagaatcaagcaagcagaccatataacatctaccctcacggaatcactgatgtccgtcctttgtattcaaggagattaccaaaaggtgtaaaacatttgaaggattttccaattctgccaggagaaatattcaaatataaatggacagtgactgtagaagatgggccaactaaatcagatcctcggtgcctgacccgctattactctagtttcgttaatatggagagagatctagcttcaggactcattggccctctcctcatctgctacaaagaatctgtagatcaaagaggaaaccagataatgtcagacaagaggaatgtcatcctgttttctgtatttgatgagaaccgaagctggtacctcacagagaatatacaacgctttctccccaatccagctggagtgcagcttgaggatccagagttccaagcctccaacatcatgcacagcatcaatggctatgtttttgatagtttgcagttgtcagtttgtttgcatgaggtggcatactggtacattctaagcattggagcacagactgacttcctttctgtcttcttctctggatataccttcaaacacaaaatggtctatgaagacacactcaccctattcccattctcaggagaaactgtcttcatgtcgatggaaaacccaggtctatggattctggggtgccacaactcagactttcggaacagaggcatgaccgccttactgaaggtttctagttgtgacaagaacactggtgattattacgaggacagttatgaagatatttcagcatacttgctgagtaaaaacaatgccattgaaccaagaagcttctctcaaaacggcgcgccaggtacaccgggcagcggcacggcttcgtcgtcacccggctcgtccacaccgtcgggagctacgggaagcccaggagcgtcaccgggaacgtcgtcaacggggtcaccgggtacgccaggtagcggcacggccagcagctcgccaggttcatcgaccccgtcgggagcgactgggtcgcccggatcaagcccgtcagcttccactggaacaggacccgggtcgtcgccgtcagcctcaacggggacaggacctggttcatcgacgccgtcaggggcgacaggctcgcccggatcgtcaacaccctcgggggcaacggggagccctggtgcgtcgcctggaacctcatccaccggaagcccgggggcctcgccgggtacgagctccacgggatcgcccggagcgtcccccggaacttcaagcacagggagccctgcctcgagcccaccagtcttgaaacgccatcaagctgaaataactcgtactactcttcagtcagatcaagaggaaatcgattatgatgataccatatcagttgaaatgaagaaggaagattttgacatttatgatgaggatgaaaatcagagcccccgcagctttcaaaagaaaacacgacactattttattgctgcagtggagaggctctgggattatgggatgagtagctccccacatgttctaagaaacagggctcagagtggcagtgtccctcagttcaagaaagttgttttccaggaatttactgatggctcctttactcagcccttataccgtggagaactaaatgaacatttgggactcctggggccatatataagagcagaagttgaagataatatcatggtaactttcagaaatcaggcctctcgtccctattccttctattctagccttatttcttatgaggaagatcagaggcaaggagcagaacctagaaaaaactttgtcaagcctaatgaaaccaaaacttacttttggaaagtgcaacatcatatggcacccactaaagatgagtttgactgcaaagcctgggcttatttctctgatgttgacctggaaaaagatgtgcactcaggcctgattggaccccttctggtctgccacactaacacactgaaccctgctcatgggagacaagtgacagtacaggaatttgctctgtttttcaccatctttgatgagaccaaaagctggtacttcactgaaaatatggaaagaaactgcaggggcgcgccaggtacgcccgggtcgggaacagcgtcctcaagcccgggtagctcgacgccgtcaggagccacagggtcgccgggatcgtcgactccatcaggcgcaacgggatcgcctggatcaagcactccatccggagcgacgggaagcccagggagctccccgtccgcatcgactgggacgggacctggagcaagccccggtacgtcgtcaacaggttcgcctggtgcctcgcctggcacgtccagcacggggagccccggaacgccgggttccggaaccgcatcctcctcaccaggtgcctcaccgggcacctcatcaacgggatcaccaggggcttcaccgggaacgagctcgacgggttcaccgggagcgtccccggggacttcgtcgacaggtagcccaggggcaagccccggtacatcgtcaacgggttccccagggacaccggggagcggtactgcatcgtcctcacccggttcctcgacacccagcggagccacgggttcgcccggtactccggggtccggaacggccagcagctcacccggttcctcgacgccatcaggtgccacgggctcgcctggaacgccaggctcgggcactgcgagcagcagccctggatcatcaacgcctagcggagcgaccggctcccctggatcgtcaactccctcgggcgcgactgggagcccaggaagctcaccgtcggcctcgacgggaacagggcctggttcgagcccctcagcttcaacaggaacaggtccaggcgcgtcgccaggtacatcatcgacgggttcgcctgggacccctgggtccggtactgcctcatcatcgcccggatcgtccaccccctcgggagcgacaggttcgcctgcctcgagcgctccctgcaatatccagatggaagatcccacttttaaagagaattatcgcttccatgcaatcaatggctacataatggatacactacctggcttagtaatggctcaggatcaaaggattcgatggtatctgctcagcatgggcagcaatgaaaacatccattctattcatttcagtggacatgtgttcactgtacgaaaaaaagaggagtataaaatggcactgtacaatctctatccaggtgtttttgagacagtggaaatgttaccatccaaagctggaatttggcgggtggaatgccttattggcgagcatctacatgctgggatgagcacactttttctggtgtacagcaataagtgtcagactcccctgggaatggcttctggacacattagagattttcagattacagcttcaggacaatatggacagtgggccccaaagctggccagacttcattattccggatcaatcaatgcctggagcaccaaggagcccttttcttggatcaaggtggatctgttggcaccaatgattattcacggcatcaagacccagggtgcccgtcagaagttctccagcctctacatctctcagtttatcatcatgtatagtcttgatgggaagaagtggcagacttatcgaggaaattccactggaaccttaatggtcttctttggcaatgtggattcatctgggataaaacacaatatttttaaccctccaattattgctcgatacatccgtttgcacccaactcattatagcattcgcagcactcttcgcatggagttgatgggctgtgatttaaatagttgcagcatgccattgggaatggagagtaaagcaatatcagatgcacagattactgcttcatcctactttaccaatatgtttgccacctggtctccttcaaaagctcgacttcacctccaagggaggagtaatgcctggagacctcaggtgaataatccaaaagagtggctgcaagtggacttccagaagacaatgaaagtcacaggagtaactactcagggagtaaaatctctgcttaccagcatgtatgtgaaggagttcctcatctccagcagtcaagatggccatcagtggactctcttttttcagaatggcaaagtaaaggtttttcagggaaatcaagactccttcacacctgtggtgaactctctagacccaccgttactgactcgctaccttcgaattcacccccagagttgggtgcaccagattgccctgaggatggaggttctgggctgcgaggcacaggacctctacggcgcgccaccgggagcgtcacccggtacgtcctcaacggggagccctggggcatcacccggcacgtcctcgacagggtcccccggaacaccgggttcggggactgcgtcgtcgtcacccggttcgtcaacacccagcggtgcgacgggttccccgggaacccccggatcaggaacagcgtcgtcgagccccggaagctcgaccccgtcaggagcgaccgggtcgccaggaacgcctgggtcgggtactgcctcatcgtcgccgggttcatcgacgccctccggagcaacaggttcacccgggtcgtccacccccagcggagcgactggatcaccgggatcgagcccgtcggcatcgacaggaacaggtcccggtagctccccatcggcctccacggggacggggcctggtgcgtcaccggggacaagcagcacgggttcgccgggaacgccagggtcagggaccgcgtcgtcgagcccagggtcgtccaccccaagcggggctactgggtccccgggtagctcgccgagcgcatcaacgggaaccggaccgggcagctccccctcagcgtcgacagggacaggccctggcgcgagcccgggaacatcgtcgacggggtcacccggagcatcgccagggacctcgtcaactggctcgcctggatcgtcaacgccctcgggagccacggggtcgcccggatcatccccgtccgcctcaactggcacaggccctggtgcttcccctggaacgtccagcacaggctcccccggttccagcccttccgcttcgactgggactggacccggaaccccgggatcggggacagcgtcaagctcgcccggaagctccacgccttcgggggcaaccgggtcagcctcgagcgaacaaaaactcatctcagaagaggatctgtcacctgcaaccggtcatcatcaccatcaccattga

SEQ ID NO: 1469 - protein, 2089 aa, synthetic construct
  REGION 1..2089: note = Description of Artificial Sequence: Synthetic polypeptide
ATRRYYLGAVELSWDYMQSDLGELPVDARFPPRVPKSFPFNTSVVYKKTLFVEFTDHLFNIAKPRPPWMGLLGPTIQAEVYDTVVITLKNMASHPVSLHAVGVSYWKASEGAEYDDQTSQREKEDDKVFPGGSHTYVWQVLKENGPMASDPLCLTYSYLSHVDLVKDLNSGLIGALLVCREGSLAKEKTQTLHKFILLFAVFDEGKSWHSETKNSLMQDRDAASARAWPKMHTVNGYVNRSLPGLIGCHRKSVYWHVIGMGTTPEVHSIFLEGHTFLVRNHRQASLEISPITFLTAQTLLMDLGQFLLFCHISSHQHDGMEAYVKVDSCPEEPQLRMKNNEEAEDYDDDLTDSEMDVVRFDDDNSPSFIQIRSVAKKHPKTWVHYIAAEEEDWDYAPLVLAPDDRSYKSQYLNNGPQRIGRKYKKVRFMAYTDETFKTREAIQHESGILGPLLYGEVGDTLLIIFKNQASRPYNIYPHGITDVRPLYSRRLPKGVKHLKDFPILPGEIFKYKWTVTVEDGPTKSDPRCLTRYYSSFVNMERDLASGLIGPLLICYKESVDQRGNQIMSDKRNVILFSVFDENRSWYLTENIQRFLPNPAGVQLEDPEFQASNIMHSINGYVFDSLQLSVCLHEVAYWYILSIGAQTDFLSVFFSGYTFKHKMVYEDTLTLFPFSGETVFMSMENPGLWILGCHNSDFRNRGMTALLKVSSCDKNTGDYYEDSYEDISAYLLSKNNAIEPRSFSQNGAPPGASPGTSSTGSPGASPGTSSTGSPGTPGSGTASSSPGSSTPSGATGSPGTPGSGTASSSPGSSTPSGATGSPGTPGSGTASSSPGSSTPSGATGSPGSSTPSGATGSPGSSPSASTGTGPGSSPSASTGTGPGASPGTSSTGSPGTPGSGTASSSPGSSTPSGATGSPGSSPSASTGTGPGSSPSASTGTGPGASPGTSSTGSPGASPGTSSTGSPGSSTPSGATGSPGSSPSASTGTGPGASPGTSSTGSPGSSPSASTGTGPGTPGSGTASSSPGSSTPSGATGSASSPPVLKRHQAEITRTTLQSDQEEIDYDDTISVEMKKEDFDIYDEDENQSPRSFQKKTRHYFIAAVERLWDYGMSSSPHVLRNRAQSGSVPQFKKVVFQEFTDGSFTQPLYRGELNEHLGLLGPYIRAEVEDNIMVTFRNQASRPYSFYSSLISYEEDQRQGAEPRKNFVKPNETKTYFWKVQHHMAPTKDEFDCKAWAYFSDVDLEKDVHSGLIGPLLVCHTNTLNPAHGRQVTVQEFALFFTIFDETKSWYFTENMERNCRGAPGSPAGSPTSTEEGTSESATPESGPGSEPATSGSETPASSAPCNIQMEDPTFKENYRFHAINGYIMDTLPGLVMAQDQRIRWYLLSMGSNENIHSIHFSGHVFTVRKKEEYKMALYNLYPGVFETVEMLPSKAGIWRVECLIGEHLHAGMSTLFLVYSNKCQTPLGMASGHIRDFQITASGQYGQWAPKLARLHYSGSINAWSTKEPFSWIKVDLLAPMIIHGIKTQGARQKFSSLYISQFIIMYSLDGKKWQTYRGNSTGTLMVFFGNVDSSGIKHNIFNPPIIARYIRLHPTHYSIRSTLRMELMGCDLNSCSMPLGMESKAISDAQITASSYFTNMFATWSPSKARLHLQGRSNAWRPQVNNPKEWLQVDFQKTMKVTGVTTQGVKSLLTSMYVKEFLISSSQDGHQWTLFFQNGKVKVFQGNQDSFTPVVNSLDPPLLTRYLRIHPQSWVHQIALRMEVLGCEAQDLYGAPPGASPGTSSTGSPGASPGTSSTGSPGTPGSGTASSSPGSSTPSGATGSPGTPGSGTASSSPGSSTPSGATGSPGTPGSGTASSSPGSSTPSGATGSPGSSTPSGATGSPGSSPSASTGTGPGSSPSASTGTGPGASPGTSSTGSPGTPGSGTASSSPGSSTPSGATGSPGSSPSASTGTGPGSSPSASTGTGPGASPGTSSTGSPGASPGTSSTGSPGSSTPSGATGSPGSSPSASTGTGPGASPGTSSTGSPGSSPSASTGTGPGTPGSGTASSSPGSSTPSGATGSASSEQKLISEEDLSPATGHHHHHH

SEQ ID NO: 1470 - DNA, 6270 bp, synthetic construct
  misc_feature 1..6270: note = Description of Artificial Sequence: Synthetic polynucleotide
  source 1..6270: mol_type = other DNA
gccaccagaagatactacctgggtgcagtggaactgtcatgggactatatgcaaagtgatctcggtgagctgcctgtggacgcaagatttcctcctagagtgccaaaatcttttccattcaacacctcagtcgtgtacaaaaagactctgtttgtagaattcacggatcaccttttcaacatcgctaagccaaggccaccctggatgggtctgctaggtcctaccatccaggctgaggtttatgatacagtggtcattacacttaagaacatggcttcccatcctgtcagtcttcatgctgttggtgtatcctactggaaagcttctgagggagctgaatatgatgatcagaccagtcaaagggagaaagaagatgataaagtcttccctggtggaagccatacatatgtctggcaggtcctgaaagagaatggtccaatggcctctgacccactgtgccttacctactcatatctttctcatgtggacctggtaaaagacttgaattcaggcctcattggagccctactagtatgtagagaagggagtctggccaaggaaaagacacagaccttgcacaaatttatactactttttgctgtatttgatgaagggaaaagttggcactcagaaacaaagaactccttgatgcaggatagggatgctgcatctgctcgggcctggcctaaaatgcacacagtcaatggttatgtaaacaggtctctgccaggtctgattggatgccacaggaaatcagtctattggcatgtgattggaatgggcaccactcctgaagtgcactcaatattcctcgaaggtcacacatttcttgtgaggaaccatcgccaggctagcttggaaatctcgccaataactttccttactgctcaaacactcttgatggaccttggacagtttctactgttttgtcatatctcttcccaccaacatgatggcatggaagcttatgtcaaagtagacagctgtccagaggaaccccaactacgaatgaaaaataatgaagaagcggaagactatgatgatgatcttactgattctgaaatggatgtggtcaggtttgatgatgacaactctccttcctttatccaaattcgctcagttgccaagaagcatcctaaaacttgggtacattacattgctgctgaagaggaggactgggactatgctcccttagtcctcgcccccgatgacagaagttataaaagtcaatatttgaacaatggccctcagcggattggtaggaagtacaaaaaagtccgatttatggcatacacagatgaaacctttaagactcgtgaagctattcagcatgaatcaggaatcttgggacctttactttatggggaagttggagacacactgttgattatatttaagaatcaagcaagcagaccatataacatctaccctcacggaatcactgatgtccgtcctttgtattcaaggagattaccaaaaggtgtaaaacatttgaaggattttccaattctgccaggagaaatattcaaatataaatggacagtgactgtagaagatgggccaactaaatcagatcctcggtgcctgacccgctattactctagtttcgttaatatggagagagatctagcttcaggactcattggccctctcctcatctgctacaaagaatctgtagatcaaagaggaaaccagataatgtcagacaagaggaatgtcatcctgttttctgtatttgatgagaaccgaagctggtacctcacagagaatatacaacgctttctccccaatccagctggagtgcagcttgaggatccagagttccaagcctccaacatcatgcacagcatcaatggctatgtttttgatagtttgcagttgtcagtttgtttgcatgaggtggcatactggtacattctaagcattggagcacagactgacttcctttctgtcttcttctctggatataccttcaaacacaaaatggtctatgaagacacactcaccctattcccattctcaggagaaactgtcttcatgtcgatggaaaacccaggtctatggattctggggtgccacaactcagactttcggaacagaggcatgaccgccttactgaaggtttctagttgtgacaagaacactggtgattattacgaggacagttatgaagatatttcagcatacttgctgagtaaaaacaatgccattgaaccaagaagcttctctcaaaacggcgcgccaccgggagcgtcacccggtacgtcctcaacggggagccctggggcatcacccggcacgtcctcgacagggtcccccggaacaccgggttcggggactgcgtcgtcgtcacccggttcgtcaacacccagcggtgcgacgggttccccgggaacccccggatcaggaacagcgtcgtcgagccccggaagctcgaccccgtcaggagcgaccgggtcgccaggaacgcctgggtcgggtactgcctcatcgtcgccgggttcatcgacgccctccggagcaacaggttcacccgggtcgtccacccccagcggagcgactggatcaccgggatcgagcccgtcggcatcgacaggaacaggtcccggtagctccccatcggcctccacggggacggggcctggtgcgtcaccggggacaagcagcacgggttcgccgggaacgccagggtcagggaccgcgtcgtcgagcccagggtcgtccaccccaagcggggctactgggtccccgggtagctcgccgagcgcatcaacgggaaccggaccgggcagctccccctcagcgtcgacagggacaggccctggcgcgagcccgggaacatcgtcgacggggtcacccggagcatcgccagggacctcgtcaactggctcgcctggatcgtcaacgccctcgggagccacggggtcgcccggatcatccccgtccgcctcaactggcacaggccctggtgcttcccctggaacgtccagcacaggctcccccggttccagcccttccgcttcgactgggactggacccggaaccccgggatcggggacagcgtcaagctcgcccggaagctccacgccttcgggggcaaccgggtcagcctcgagcccaccagtcttgaaacgccatcaagctgaaataactcgtactactcttcagtcagatcaagaggaaatcgattatgatgataccatatcagttgaaatgaagaaggaagattttgacatttatgatgaggatgaaaatcagagcccccgcagctttcaaaagaaaacacgacactattttattgctgcagtggagaggctctgggattatgggatgagtagctccccacatgttctaagaaacagggctcagagtggcagtgtccctcagttcaagaaagttgttttccaggaatttactgatggctcctttactcagcccttataccgtggagaactaaatgaacatttgggactcctggggccatatataagagcagaagttgaagataatatcatggtaactttcagaaatcaggcctctcgtccctattccttctattctagccttatttcttatgaggaagatcagaggcaaggagcagaacctagaaaaaactttgtcaagcctaatgaaaccaaaacttacttttggaaagtgcaacatcatatggcacccactaaagatgagtttgactgcaaagcctgggcttatttctctgatgttgacctggaaaaagatgtgcactcaggcctgattggaccccttctggtctgccacactaacacactgaaccctgctcatgggagacaagtgacagtacaggaatttgctctgtttttcaccatctttgatgagaccaaaagctggtacttcactgaaaatatggaaagaaactgcaggggcgcgccaggttctcctgctggctcccccacctcaacagaagaggggacaagcgaaagcgctacgcctgagagtggccctggctctgagccagccacctccggctctgaaacccctgcctcgagcgctccctgcaatatccagatggaagatcccacttttaaagagaattatcgcttccatgcaatcaatggctacataatggatacactacctggcttagtaatggctcaggatcaaaggattcgatggtatctgctcagcatgggcagcaatgaaaacatccattctattcatttcagtggacatgtgttcactgtacgaaaaaaagaggagtataaaatggcactgtacaatctctatccaggtgtttttgagacagtggaaatgttaccatccaaagctggaatttggcgggtggaatgccttattggcgagcatctacatgctgggatgagcacactttttctggtgtacagcaataagtgtcagactcccctgggaatggcttctggacacattagagattttcagattacagcttcaggacaatatggacagtgggccccaaagctggccagacttcattattccggatcaatcaatgcctggagcaccaaggagcccttttcttggatcaaggtggatctgttggcaccaatgattattcacggcatcaagacccagggtgcccgtcagaagttctccagcctctacatctctcagtttatcatcatgtatagtcttgatgggaagaagtggcagacttatcgaggaaattccactggaaccttaatggtcttctttggcaatgtggattcatctgggataaaacacaatatttttaaccctccaattattgctcgatacatccgtttgcacccaactcattatagcattcgcagcactcttcgcatggagttgatgggctgtgatttaaatagttgcagcatgccattgggaatggagagtaaagcaatatcagatgcacagattactgcttcatcctactttaccaatatgtttgccacctggtctccttcaaaagctcgacttcacctccaagggaggagtaatgcctggagacctcaggtgaataatccaaaagagtggctgcaagtggacttccagaagacaatgaaagtcacaggagtaactactcagggagtaaaatctctgcttaccagcatgtatgtgaaggagttcctcatctccagcagtcaagatggccatcagtggactctcttttttcagaatggcaaagtaaaggtttttcagggaaatcaagactccttcacacctgtggtgaactctctagacccaccgttactgactcgctaccttcgaattcacccccagagttgggtgcaccagattgccctgaggatggaggttctgggctgcgaggcacaggacctctacggcgcgccaccgggagcgtcacccggtacgtcctcaacggggagccctggggcatcacccggcacgtcctcgacagggtcccccggaacaccgggttcggggactgcgtcgtcgtcacccggttcgtcaacacccagcggtgcgacgggttccccgggaacccccggatcaggaacagcgtcgtcgagccccggaagctcgaccccgtcaggagcgaccgggtcgccaggaacgcctgggtcgggtactgcctcatcgtcgccgggttcatcgacgccctccggagcaacaggttcacccgggtcgtccacccccagcggagcgactggatcaccgggatcgagcccgtcggcatcgacaggaacaggtcccggtagctccccatcggcctccacggggacggggcctggtgcgtcaccggggacaagcagcacgggttcgccgggaacgccagggtcagggaccgcgtcgtcgagcccagggtcgtccaccccaagcggggctactgggtccccgggtagctcgccgagcgcatcaacgggaaccggaccgggcagctccccctcagcgtcgacagggacaggccctggcgcgagcccgggaacatcgtcgacggggtcacccggagcatcgccagggacctcgtcaactggctcgcctggatcgtcaacgccctcgggagccacggggtcgcccggatcatccccgtccgcctcaactggcacaggccctggtgcttcccctggaacgtccagcacaggctcccccggttccagcccttccgcttcgactgggactggacccggaaccccgggatcggggacagcgtcaagctcgcccggaagctccacgccttcgggggcaaccgggtcagcctcgagcgaacaaaaactcatctcagaagaggatctgtcacctgcaaccggtcatcatcaccatcaccattga

SEQ ID NO: 1471 - protein, 2197 aa, synthetic construct
  REGION 1..2197: note = Description of Artificial Sequence: Synthetic polypeptide
ATRRYYLGAVELSWDYMQSDLGELPVDARFPPRVPKSFPFNTSVVYKKTLFVEFTDHLFNIAKPRPPWMGLLGPTIQAEVYDTVVITLKNMASHPVSLHAVGVSYWKASEGAEYDDQTSQREKEDDKVFPGGSHTYVWQVLKENGPMASDPLCLTYSYLSHVDLVKDLNSGLIGALLVCREGSLAKEKTQTLHKFILLFAVFDEGKSWHSETKNSLMQDRDAASARAWPKMHTVNGYVNRSLPGLIGCHRKSVYWHVIGMGTTPEVHSIFLEGHTFLVRNHRQASLEISPITFLTAQTLLMDLGQFLLFCHISSHQHDGMEAYVKVDSCPEEPQLRMKNNEEAEDYDDDLTDSEMDVVRFDDDNSPSFIQIRSVAKKHPKTWVHYIAAEEEDWDYAPLVLAPDDRSYKSQYLNNGPQRIGRKYKKVRFMAYTDETFKTREAIQHESGILGPLLYGEVGDTLLIIFKNQASRPYNIYPHGITDVRPLYSRRLPKGVKHLKDFPILPGEIFKYKWTVTVEDGPTKSDPRCLTRYYSSFVNMERDLASGLIGPLLICYKESVDQRGNQIMSDKRNVILFSVFDENRSWYLTENIQRFLPNPAGVQLEDPEFQASNIMHSINGYVFDSLQLSVCLHEVAYWYILSIGAQTDFLSVFFSGYTFKHKMVYEDTLTLFPFSGETVFMSMENPGLWILGCHNSDFRNRGMTALLKVSSCDKNTGDYYEDSYEDISAYLLSKNNAIEPRSFSQNGAPPGASPGTSSTGSPGASPGTSSTGSPGTPGSGTASSSPGSSTPSGATGSPGTPGSGTASSSPGSSTPSGATGSPGTPGSGTASSSPGSSTPSGATGSPGSSTPSGATGSPGSSPSASTGTGPGSSPSASTGTGPGASPGTSSTGSPGTPGSGTASSSPGSSTPSGATGSPGSSPSASTGTGPGSSPSASTGTGPGASPGTSSTGSPGASPGTSSTGSPGSSTPSGATGSPGSSPSASTGTGPGASPGTSSTGSPGSSPSASTGTGPGTPGSGTASSSPGSSTPSGATGSASSPPVLKRHQAEITRTTLQSDQEEIDYDDTISVEMKKEDFDIYDEDENQSPRSFQKKTRHYFIAAVERLWDYGMSSSPHVLRNRAQSGSVPQFKKVVFQEFTDGSFTQPLYRGELNEHLGLLGPYIRAEVEDNIMVTFRNQASRPYSFYSSLISYEEDQRQGAEPRKNFVKPNETKTYFWKVQHHMAPTKDEFDCKAWAYFSDVDLEKDVHSGLIGPLLVCHTNTLNPAHGRQVTVQEFALFFTIFDETKSWYFTENMERNCRGAPGTPGSGTASSSPGASPGTSSTGSPGASPGTSSTGSPGASPGTSSTGSPGSSPSASTGTGPGTPGSGTASSSPGASPGTSSTGSPGASPGTSSTGSPGASPGTSSTGSPGSSTPSGATGSPGSSTPSGATGSPGASPGTSSTGSPASSAPCNIQMEDPTFKENYRFHAINGYIMDTLPGLVMAQDQRIRWYLLSMGSNENIHSIHFSGHVFTVRKKEEYKMALYNLYPGVFETVEMLPSKAGIWRVECLIGEHLHAGMSTLFLVYSNKCQTPLGMASGHIRDFQITASGQYGQWAPKLARLHYSGSINAWSTKEPFSWIKVDLLAPMIIHGIKTQGARQKFSSLYISQFIIMYSLDGKKWQTYRGNSTGTLMVFFGNVDSSGIKHNIFNPPIIARYIRLHPTHYSIRSTLRMELMGCDLNSCSMPLGMESKAISDAQITASSYFTNMFATWSPSKARLHLQGRSNAWRPQVNNPKEWLQVDFQKTMKVTGVTTQGVKSLLTSMYVKEFLISSSQDGHQWTLFFQNGKVKVFQGNQDSFTPVVNSLDPPLLTRYLRIHPQSWVHQIALRMEVLGCEAQDLYGAPPGASPGTSSTGSPGASPGTSSTGSPGTPGSGTASSSPGSSTPSGATGSPGTPGSGTASSSPGSSTPSGATGSPGTPGSGTASSSPGSSTPSGATGSPGSSTPSGATGSPGSSPSASTGTGPGSSPSASTGTGPGASPGTSSTGSPGTPGSGTASSSPGSSTPSGATGSPGSSPSASTGTGPGSSPSASTGTGPGASPGTSSTGSPGASPGTSSTGSPGSSTPSGATGSPGSSPSASTGTGPGASPGTSSTGSPGSSPSASTGTGPGTPGSGTASSSPGSSTPSGATGSASSEQKLISEEDLSPATGHHHHHH

SEQ ID NO: 1472 - DNA, 6594 bp, synthetic construct
  misc_feature 1..6594: note = Description of Artificial Sequence: Synthetic polynucleotide
  source 1..6594: mol_type = other DNA
gccaccagaagatactacctgggtgcagtggaactgtcatgggactatatgcaaagtgatctcggtgagctgcctgtggacgcaagatttcctcctagagtgccaaaatcttttccattcaacacctcagtcgtgtacaaaaagactctgtttgtagaattcacggatcaccttttcaacatcgctaagccaaggccaccctggatgggtctgctaggtcctaccatccaggctgaggtttatgatacagtggtcattacacttaagaacatggcttcccatcctgtcagtcttcatgctgttggtgtatcctactggaaagcttctgagggagctgaatatgatgatcagaccagtcaaagggagaaagaagatgataaagtcttccctggtggaagccatacatatgtctggcaggtcctgaaagagaatggtccaatggcctctgacccactgtgccttacctactcatatctttctcatgtggacctggtaaaagacttgaattcaggcctcattggagccctactagtatgtagagaagggagtctggccaaggaaaagacacagaccttgcacaaatttatactactttttgctgtatttgatgaagggaaaagttggcactcagaaacaaagaactccttgatgcaggatagggatgctgcatctgctcgggcctggcctaaaatgcacacagtcaatggttatgtaaacaggtctctgccaggtctgattggatgccacaggaaatcagtctattggcatgtgattggaatgggcaccactcctgaagtgcactcaatattcctcgaaggtcacacatttcttgtgaggaaccatcgccaggctagcttggaaatctcgccaataactttccttactgctcaaacactcttgatggaccttggacagtttctactgttttgtcatatctcttcccaccaacatgatggcatggaagcttatgtcaaagtagacagctgtccagaggaaccccaactacgaatgaaaaataatgaagaagcggaagactatgatgatgatcttactgattctgaaatggatgtggtcaggtttgatgatgacaactctccttcctttatccaaattcgctcagttgccaagaagcatcctaaaacttgggtacattacattgctgctgaagaggaggactgggactatgctcccttagtcctcgcccccgatgacagaagttataaaagtcaatatttgaacaatggccctcagcggattggtaggaagtacaaaaaagtccgatttatggcatacacagatgaaacctttaagactcgtgaagctattcagcatgaatcaggaatcttgggacctttactttatggggaagttggagacacactgttgattatatttaagaatcaagcaagcagaccatataacatctaccctcacggaatcactgatgtccgtcctttgtattcaaggagattaccaaaaggtgtaaaacatttgaaggattttccaattctgccaggagaaatattcaaatataaatggacagtgactgtagaagatgggccaactaaatcagatcctcggtgcctgacccgctattactctagtttcgttaatatggagagagatctagcttcaggactcattggccctctcctcatctgctacaaagaatctgtagatcaaagaggaaaccagataatgtcagacaagaggaatgtcatcctgttttctgtatttgatgagaaccgaagctggtacctcacagagaatatacaacgctttctccccaatccagctggagtgcagcttgaggatccagagttccaagcctccaacatcatgcacagcatcaatggctatgtttttgatagtttgcagttgtcagtttgtttgcatgaggtggcatactggtacattctaagcattggagcacagactgacttcctttctgtcttcttctctggatataccttcaaacacaaaatggtctatgaagacacactcaccctattcccattctcaggagaaactgtcttcatgtcgatggaaaacccaggtctatggattctggggtgccacaactcagactttcggaacagaggcatgaccgccttactgaaggtttctagttgtgacaagaacactggtgattattacgaggacagttatgaagatatttcagcatacttgctgagtaaaaacaatgccattgaaccaagaagcttctctcaaaacggcgcgccaccgggagcgtcacccggtacgtcctcaacggggagccctggggcatcacccggcacgtcctcgacagggtcccccggaacaccgggttcggggactgcgtcgtcgtcacccggttcgtcaacacccagcggtgcgacgggttccccgggaacccccggatcaggaacagcgtcgtcgagccccggaagctcgaccccgtcaggagcgaccgggtcgccaggaacgcctgggtcgggtactgcctcatcgtcgccgggttcatcgacgccctccggagcaacaggttcacccgggtcgtccacccccagcggagcgactggatcaccgggatcgagcccgtcggcatcgacaggaacaggtcccggtagctccccatcggcctccacggggacggggcctggtgcgtcaccggggacaagcagcacgggttcgccgggaacgccagggtcagggaccgcgtcgtcgagcccagggtcgtccaccccaagcggggctactgggtccccgggtagctcgccgagcgcatcaacgggaaccggaccgggcagctccccctcagcgtcgacagggacaggccctggcgcgagcccgggaacatcgtcgacggggtcacccggagcatcgccagggacctcgtcaactggctcgcctggatcgtcaacgccctcgggagccacggggtcgcccggatcatccccgtccgcctcaactggcacaggccctggtgcttcccctggaacgtccagcacaggctcccccggttccagcccttccgcttcgactgggactggacccggaaccccgggatcggggacagcgtcaagctcgcccggaagctccacgccttcgggggcaaccgggtcagcctcgagcccaccagtcttgaaacgccatcaagctgaaataactcgtactactcttcagtcagatcaagaggaaatcgattatgatgataccatatcagttgaaatgaagaaggaagattttgacatttatgatgaggatgaaaatcagagcccccgcagctttcaaaagaaaacacgacactattttattgctgcagtggagaggctctgggattatgggatgagtagctccccacatgttctaagaaacagggctcagagtggcagtgtccctcagttcaagaaagttgttttccaggaatttactgatggctcctttactcagcccttataccgtggagaactaaatgaacatttgggactcctggggccatatataagagcagaagttgaagataatatcatggtaactttcagaaatcaggcctctcgtccctattccttctattctagccttatttcttatgaggaagatcagaggcaaggagcagaacctagaaaaaactttgtcaagcctaatgaaaccaaaacttacttttggaaagtgcaacatcatatggcacccactaaagatgagtttgactgcaaagcctgggcttatttctctgatgttgacctggaaaaagatgtgcactcaggcctgattggaccccttctggtctgccacactaacacactgaaccctgctcatgggagacaagtgacagtacaggaatttgctctgtttttcaccatctttgatgagaccaaaagctggtacttcactgaaaatatggaaagaaactgcaggggcgcgccaggtacacccggatcgggtacagcgtcatcgagccccggtgcgtcacctggtacgtcgagcacggggtcgccaggggcgtcccctgggacgtcctcaacaggctcgcccggtgcgtcacccggcacgtcgtccacgggttcacctggtagctccccttccgcgtccactggcaccgggcctggaactccggggagcggcacagcgagctcgtcgccgggagcatcgcctgggacatcgagcaccgggtcgccaggagcatcgcccggaacatccagcacaggaagccccggcgcgtcgcccgggacatcaagcacaggttccccgggatcgagcacgccgtccggagccactggatcaccagggagctcgacaccttccggcgcaacgggatcgcccggagccagcccgggtacgtcaagcactggctcccctgcctcgagcgctccctgcaatatccagatggaagatcccacttttaaagagaattatcgcttccatgcaatcaatggctacataatggatacactacctggcttagtaatggctcaggatcaaaggattcgatggtatctgctcagcatgggcagcaatgaaaacatccattctattcatttcagtggacatgtgttcactgtacgaaaaaaagaggagtataaaatggcactgtacaatctctatccaggtgtttttgagacagtggaaatgttaccatccaaagctggaatttggcgggtggaatgccttattggcgagcatctacatgctgggatgagcacactttttctggtgtacagcaataagtgtcagactcccctgggaatggcttctggacacattagagattttcagattacagcttcaggacaatatggacagtgggccccaaagctggccagacttcattattccggatcaatcaatgcctggagcaccaaggagcccttttcttggatcaaggtggatctgttggcaccaatgattattcacggcatcaagacccagggtgcccgtcagaagttctccagcctctacatctctcagtttatcatcatgtatagtcttgatgggaagaagtggcagacttatcgaggaaattccactggaaccttaatggtcttctttggcaatgtggattcatctgggataaaacacaatatttttaaccctccaattattgctcgatacatccgtttgcacccaactcattatagcattcgcagcactcttcgcatggagttgatgggctgtgatttaaatagttgcagcatgccattgggaatggagagtaaagcaatatcagatgcacagattactgcttcatcctactttaccaatatgtttgccacctggtctccttcaaaagctcgacttcacctccaagggaggagtaatgcctggagacctcaggtgaataatccaaaagagtggctgcaagtggacttccagaagacaatgaaagtcacaggagtaactactcagggagtaaaatctctgcttaccagcatgtatgtgaaggagttcctcatctccagcagtcaagatggccatcagtggactctcttttttcagaatggcaaagtaaaggtttttcagggaaatcaagactccttcacacctgtggtgaactctctagacccaccgttactgactcgctaccttcgaattcacccccagagttgggtgcaccagattgccctgaggatggaggttctgggctgcgaggcacaggacctctacggcgcgccaccgggagcgtcacccggtacgtcctcaacggggagccctggggcatcacccggcacgtcctcgacagggtcccccggaacaccgggttcggggactgcgtcgtcgtcacccggttcgtcaacacccagcggtgcgacgggttccccgggaacccccggatcaggaacagcgtcgtcgagccccggaagctcgaccccgtcaggagcgaccgggtcgccaggaacgcctgggtcgggtactgcctcatcgtcgccgggttcatcgacgccctccggagcaacaggttcacccgggtcgtccacccccagcggagcgactggatcaccgggatcgagcccgtcggcatcgacaggaacaggtcccggtagctccccatcggcctccacggggacggggcctggtgcgtcaccggggacaagcagcacgggttcgccgggaacgccagggtcagggaccgcgtcgtcgagcccagggtcgtccaccccaagcggggctactgggtccccgggtagctcgccgagcgcatcaacgggaaccggaccgggcagctccccctcagcgtcgacagggacaggccctggcgcgagcccgggaacatcgtcgacggggtcacccggagcatcgccagggacctcgtcaactggctcgcctggatcgtcaacgccctcgggagccacggggtcgcccggatcatccccgtccgcctcaactggcacaggccctggtgcttcccctggaacgtccagcacaggctcccccggttccagcccttccgcttcgactgggactggacccggaaccccgggatcggggacagcgtcaagctcgcccggaagctccacgccttcgggggcaaccgggtcagcctcgagcgaacaaaaactcatctcagaagaggatctgtcacctgcaaccggtcatcatcaccatcaccattga

SEQ ID NO: 1473 - protein, 2341 aa, synthetic construct
  REGION 1..2341: note = Description of Artificial Sequence: Synthetic polypeptide
ATRRYYLGAVELSWDYMQSDLGELPVDARFPPRVPKSFPFNTSVVYKKTLFVEFTDHLFNIAKPRPPWMGLLGPTIQAEVYDTVVITLKNMASHPVSLHAVGVSYWKASEGAEYDDQTSQREKEDDKVFPGGSHTYVWQVLKENGPMASDPLCLTYSYLSHVDLVKDLNSGLIGALLVCREGSLAKEKTQTLHKFILLFAVFDEGKSWHSETKNSLMQDRDAASARAWPKMHTVNGYVNRSLPGLIGCHRKSVYWHVIGMGTTPEVHSIFLEGHTFLVRNHRQASLEISPITFLTAQTLLMDLGQFLLFCHISSHQHDGMEAYVKVDSCPEEPQLRMKNNEEAEDYDDDLTDSEMDVVRFDDDNSPSFIQIRSVAKKHPKTWVHYIAAEEEDWDYAPLVLAPDDRSYKSQYLNNGPQRIGRKYKKVRFMAYTDETFKTREAIQHESGILGPLLYGEVGDTLLIIFKNQASRPYNIYPHGITDVRPLYSRRLPKGVKHLKDFPILPGEIFKYKWTVTVEDGPTKSDPRCLTRYYSSFVNMERDLASGLIGPLLICYKESVDQRGNQIMSDKRNVILFSVFDENRSWYLTENIQRFLPNPAGVQLEDPEFQASNIMHSINGYVFDSLQLSVCLHEVAYWYILSIGAQTDFLSVFFSGYTFKHKMVYEDTLTLFPFSGETVFMSMENPGLWILGCHNSDFRNRGMTALLKVSSCDKNTGDYYEDSYEDISAYLLSKNNAIEPRSFSQNGAPPGASPGTSSTGSPGASPGTSSTGSPGTPGSGTASSSPGSSTPSGATGSPGTPGSGTASSSPGSSTPSGATGSPGTPGSGTASSSPGSSTPSGATGSPGSSTPSGATGSPGSSPSASTGTGPGSSPSASTGTGPGASPGTSSTGSPGTPGSGTASSSPGSSTPSGATGSPGSSPSASTGTGPGSSPSASTGTGPGASPGTSSTGSPGASPGTSSTGSPGSSTPSGATGSPGSSPSASTGTGPGASPGTSSTGSPGSSPSASTGTGPGTPGSGTASSSPGSSTPSGATGSASSPPVLKRHQAEITRTTLQSDQEEIDYDDTISVEMKKEDFDIYDEDENQSPRSFQKKTRHYFIAAVERLWDYGMSSSPHVLRNRAQSGSVPQFKKVVFQEFTDGSFTQPLYRGELNEHLGLLGPYIRAEVEDNIMVTFRNQASRPYSFYSSLISYEEDQRQGAEPRKNFVKPNETKTYFWKVQHHMAPTKDEFDCKAWAYFSDVDLEKDVHSGLIGPLLVCHTNTLNPAHGRQVTVQEFALFFTIFDETKSWYFTENMERNCRGAPGTPGSGTASSSPGSSTPSGATGSPGSSTPSGATGSPGSSTPSGATGSPGSSPSASTGTGPGASPGTSSTGSPGASPGTSSTGSPGTPGSGTASSSPGASPGTSSTGSPGASPGTSSTGSPGASPGTSSTGSPGASPGTSSTGSPGTPGSGTASSSPGSSTPSGATGSPGTPGSGTASSSPGSSTPSGATGSPGTPGSGTASSSPGSSTPSGATGSPGSSTPSGATGSPGSSPSASTGTGPGSSPSASTGTGPGASPGTSSTGSPGTPGSGTASSSPGSSTPSGATGSPASSAPCNIQMEDPTFKENYRFHAINGYIMDTLPGLVMAQDQRIRWYLLSMGSNENIHSIHFSGHVFTVRKKEEYKMALYNLYPGVFETVEMLPSKAGIWRVECLIGEHLHAGMSTLFLVYSNKCQTPLGMASGHIRDFQITASGQYGQWAPKLARLHYSGSINAWSTKEPFSWIKVDLLAPMIIHGIKTQGARQKFSSLYISQFIIMYSLDGKKWQTYRGNSTGTLMVFFGNVDSSGIKHNIFNPPIIARYIRLHPTHYSIRSTLRMELMGCDLNSCSMPLGMESKAISDAQITASSYFTNMFATWSPSKARLHLQGRSNAWRPQVNNPKEWLQVDFQKTMKVTGVTTQGVKSLLTSMYVKEFLISSSQDGHQWTLFFQNGKVKVFQGNQDSFTPVVNSLDPPLLTRYLRIHPQSWVHQIALRMEVLGCEAQDLYGAPPGASPGTSSTGSPGASPGTSSTGSPGTPGSGTASSSPGSSTPSGATGSPGTPGSGTASSSPGSSTPSGATGSPGTPGSGTASSSPGSSTPSGATGSPGSSTPSGATGSPGSSPSASTGTGPGSSPSASTGTGPGASPGTSSTGSPGTPGSGTASSSPGSSTPSGATGSPGSSPSASTGTGPGSSPSASTGTGPGASPGTSSTGSPGASPGTSSTGSPGSSTPSGATGSPGSSPSASTGTGPGASPGTSSTGSPGSSPSASTGTGPGTPGSGTASSSPGSSTPSGATGSASSEQKLISEEDLSPATGHHHHHH

SEQ ID NO: 1474 - DNA, 7026 bp, synthetic construct
  misc_feature 1..7026: note = Description of Artificial Sequence: Synthetic polynucleotide
  source 1..7026: mol_type = other DNA
gccaccagaagatactacctgggtgcagtggaactgtcatgggactatatgcaaagtgatctcggtgagctgcctgtggacgcaagatttcctcctagagtgccaaaatcttttccattcaacacctcagtcgtgtacaaaaagactctgtttgtagaattcacggatcaccttttcaacatcgctaagccaaggccaccctggatgggtctgctaggtcctaccatccaggctgaggtttatgatacagtggtcattacacttaagaacatggcttcccatcctgtcagtcttcatgctgttggtgtatcctactggaaagcttctgagggagctgaatatgatgatcagaccagtcaaagggagaaagaagatgataaagtcttccctggtggaagccatacatatgtctggcaggtcctgaaagagaatggtccaatggcctctgacccactgtgccttacctactcatatctttctcatgtggacctggtaaaagacttgaattcaggcctcattggagccctactagtatgtagagaagggagtctggccaaggaaaagacacagaccttgcacaaatttatactactttttgctgtatttgatgaagggaaaagttggcactcagaaacaaagaactccttgatgcaggatagggatgctgcatctgctcgggcctggcctaaaatgcacacagtcaatggttatgtaaacaggtctctgccaggtctgattggatgccacaggaaatcagtctattggcatgtgattggaatgggcaccactcctgaagtgcactcaatattcctcgaaggtcacacatttcttgtgaggaaccatcgccaggctagcttggaaatctcgccaataactttccttactgctcaaacactcttgatggaccttggacagtttctactgttttgtcatatctcttcccaccaacatgatggcatggaagcttatgtcaaagtagacagctgtccagaggaaccccaactacgaatgaaaaataatgaagaagcggaagactatgatgatgatcttactgattctgaaatggatgtggtcaggtttgatgatgacaactctccttcctttatccaaattcgctcagttgccaagaagcatcctaaaacttgggtacattacattgctgctgaagaggaggactgggactatgctcccttagtcctcgcccccgatgacagaagttataaaagtcaatatttgaacaatggccctcagcggattggtaggaagtacaaaaaagtccgatttatggcatacacagatgaaacctttaagactcgtgaagctattcagcatgaatcaggaatcttgggacctttactttatggggaagttggagacacactgttgattatatttaagaatcaagcaagcagaccatataacatctaccctcacggaatcactgatgtccgtcctttgtattcaaggagattaccaaaaggtgtaaaacatttgaaggattttccaattctgccaggagaaatattcaaatataaatggacagtgactgtagaagatgggccaactaaatcagatcctcggtgcctgacccgctattactctagtttcgttaatatggagagagatctagcttcaggactcattggccctctcctcatctgctacaaagaatctgtagatcaaagaggaaaccagataatgtcagacaagaggaatgtcatcctgttttctgtatttgatgagaaccgaagctggtacctcacagagaatatacaacgctttctccccaatccagctggagtgcagcttgaggatccagagttccaagcctccaacatcatgcacagcatcaatggctatgtttttgatagtttgcagttgtcagtttgtttgcatgaggtggcatactggtacattctaagcattggagcacagactgacttcctttctgtcttcttctctggatataccttcaaacacaaaatggtctatgaagacacactcaccctattcccattctcaggagaaactgtcttcatgtcgatggaaaacccaggtctatggattctggggtgccacaactcagactttcggaacagaggcatgaccgccttactgaaggtttctagttgtgacaagaacactggtgattattacgaggacagttatgaagatatttcagcatacttgctgagtaaaaacaatgccattgaaccaagaagcttctctcaaaacggcgcgccaccgggagcgtcacccggtacgtcctcaacggggagccctggggcatcacccggcacgtcctcgacagggtcccccggaacaccgggttcggggactgcgtcgtcgtcacccggttcgtcaacacccagcggtgcgacgggttccccgggaacccccggatcaggaacagcgtcgtcgagccccggaagctcgaccccgtcaggagcgaccgggtcgccaggaacgcctgggtcgggtactgcctcatcgtcgccgggttcatcgacgccctccggagcaacaggttcacccgggtcgtccacccccagcggagcgactggatcaccgggatcgagcccgtcggcatcgacaggaacaggtcccggtagctccccatcggcctccacggggacggggcctggtgcgtcaccggggacaagcagcacgggttcgccgggaacgccagggtcagggaccgcgtcgtcgagcccagggtcgtccaccccaagcggggctactgggtccccgggtagctcgccgagcgcatcaacgggaaccggaccgggcagctccccctcagcgtcgacagggacaggccctggcgcgagcccgggaacatcgtcgacggggtcacccggagcatcgccagggacctcgtcaactggctcgcctggatcgtcaacgccctcgggagccacggggtcgcccggatcatccccgtccgcctcaactggcacaggccctggtgcttcccctggaacgtccagcacaggctcccccggttccagcccttccgcttcgactgggactggacccggaaccccgggatcggggacagcgtcaagctcgcccggaagctccacgccttcgggggcaaccgggtcagcctcgagcccaccagtcttgaaacgccatcaagctgaaataactcgtactactcttcagtcagatcaagaggaaatcgattatgatgataccatatcagttgaaatgaagaaggaagattttgacatttatgatgaggatgaaaatcagagcccccgcagctttcaaaagaaaacacgacactattttattgctgcagtggagaggctctgggattatgggatgagtagctccccacatgttctaagaaacagggctcagagtggcagtgtccctcagttcaagaaagttgttttccaggaatttactgatggctcctttactcagcccttataccgtggagaactaaatgaacatttgggactcctggggccatatataagagcagaagttgaagataatatcatggtaactttcagaaatcaggcctctcgtccctattccttctattctagccttatttcttatgaggaagatcagaggcaaggagcagaacctagaaaaaactttgtcaagcctaatgaaaccaaaacttacttttggaaagtgcaacatcatatggcacccactaaagatgagtttgactgcaaagcctgggcttatttctctgatgttgacctggaaaaagatgtgcactcaggcctgattggaccccttctggtctgccacactaacacactgaaccctgctcatgggagacaagtgacagtacaggaatttgctctgtttttcaccatctttgatgagaccaaaagctggtacttcactgaaaatatggaaagaaactgcaggggcgcgccaggtacgcccgggtcgggaacagcgtcctcaagcccgggtagctcgacgccgtcaggagccacagggtcgccgggatcgtcgactccatcaggcgcaacgggatcgcctggatcaagcactccatccggagcgacgggaagcccagggagctccccgtccgcatcgactgggacgggacctggagcaagccccggtacgtcgtcaacaggttcgcctggtgcctcgcctggcacgtccagcacggggagccccggaacgccgggttccggaaccgcatcctcctcaccaggtgcctcaccgggcacctcatcaacgggatcaccaggggcttcaccgggaacgagctcgacgggttcaccgggagcgtccccggggacttcgtcgacaggtagcccaggggcaagccccggtacatcgtcaacgggttccccagggacaccggggagcggtactgcatcgtcctcacccggttcctcgacacccagcggagccacgggttcgcccggtactccggggtccggaacggccagcagctcacccggttcctcgacgccatcaggtgccacgggctcgcctggaacgccaggctcgggcactgcgagcagcagccctggatcatcaacgcctagcggagcgaccggctcccctggatcgtcaactccctcgggcgcgactgggagcccaggaagctcaccgtcggcctcgacgggaacagggcctggttcgagcccctcagcttcaacaggaacaggtccaggcgcgtcgccaggtacatcatcgacgggttcgcctgggacccctgggtccggtactgcctcatcatcgcccggatcgtccaccccctcgggagcgacaggttcgcctgcctcgagcgctccctgcaatatccagatggaagatcccacttttaaagagaattatcgcttccatgcaatcaatggctacataatggatacactacctggcttagtaatggctcaggatcaaaggattcgatggtatctgctcagcatgggcagcaatgaaaacatccattctattcatttcagtggacatgtgttcactgtacgaaaaaaagaggagtataaaatggcactgtacaatctctatccaggtgtttttgagacagtggaaatgttaccatccaaagctggaatttggcgggtggaatgccttattggcgagcatctacatgctgggatgagcacactttttctggtgtacagcaataagtgtcagactcccctgggaatggcttctggacacattagagattttcagattacagcttcaggacaatatggacagtgggccccaaagctggccagacttcattattccggatcaatcaatgcctggagcaccaaggagcccttttcttggatcaaggtggatctgttggcaccaatgattattcacggcatcaagacccagggtgcccgtcagaagttctccagcctctacatctctcagtttatcatcatgtatagtcttgatgggaagaagtggcagacttatcgaggaaattccactggaaccttaatggtcttctttggcaatgtggattcatctgggataaaacacaatatttttaaccctccaattattgctcgatacatccgtttgcacccaactcattatagcattcgcagcactcttcgcatggagttgatgggctgtgatttaaatagttgcagcatgccattgggaatggagagtaaagcaatatcagatgcacagattactgcttcatcctactttaccaatatgtttgccacctggtctccttcaaaagctcgacttcacctccaagggaggagtaatgcctggagacctcaggtgaataatccaaaagagtggctgcaagtggacttccagaagacaatgaaagtcacaggagtaactactcagggagtaaaatctctgcttaccagcatgtatgtgaaggagttcctcatctccagcagtcaagatggccatcagtggactctcttttttcagaatggcaaagtaaaggtttttcagggaaatcaagactccttcacacctgtggtgaactctctagacccaccgttactgactcgctaccttcgaattcacccccagagttgggtgcaccagattgccctgaggatggaggttctgggctgcgaggcacaggacctctacggcgcgccaccgggagcgtcacccggtacgtcctcaacggggagccctggggcatcacccggcacgtcctcgacagggtcccccggaacaccgggttcggggactgcgtcgtcgtcacccggttcgtcaacacccagcggtgcgacgggttccccgggaacccccggatcaggaacagcgtcgtcgagccccggaagctcgaccccgtcaggagcgaccgggtcgccaggaacgcctgggtcgggtactgcctcatcgtcgccgggttcatcgacgccctccggagcaacaggttcacccgggtcgtccacccccagcggagcgactggatcaccgggatcgagcccgtcggcatcgacaggaacaggtcccggtagctccccatcggcctccacggggacggggcctggtgcgtcaccggggacaagcagcacgggttcgccgggaacgccagggtcagggaccgcgtcgtcgagcccagggtcgtccaccccaagcggggctactgggtccccgggtagctcgccgagcgcatcaacgggaaccggaccgggcagctccccctcagcgtcgacagggacaggccctggcgcgagcccgggaacatcgtcgacggggtcacccggagcatcgccagggacctcgtcaactggctcgcctggatcgtcaacgccctcgggagccacggggtcgcccggatcatccccgtccgcctcaactggcacaggccctggtgcttcccctggaacgtccagcacaggctcccccggttccagcccttccgcttcgactgggactggacccggaaccccgggatcggggacagcgtcaagctcgcccggaagctccacgccttcgggggcaaccgggtcagcctcgagcgaacaaaaactcatctcagaagaggatctgtcacctgcaaccggtcatcatcaccatcaccattga

SEQ ID NO: 1475 - protein, 1452 aa, synthetic construct
  REGION 1..1452: note = Description of Artificial Sequence: Synthetic polypeptide
ATRRYYLGAVELSWDYMQSDLGELPVDARFPPRVPKSFPFNTSVVYKKTLFVEFTDHLFNIAKPRPPWMGLLGPTIQAEVYDTVVITLKNMASHPVSLHAVGVSYWKASEGAEYDDQTSQREKEDDKVFPGGSHTYVWQVLKENGPMASDPLCLTYSYLSHVDLVKDLNSGLIGALLVCREGSLAKEKTQTLHKFILLFAVFDEGKSWHSETKNSLMQDRDAASARAWPKMHTVNGYVNRSLPGLIGCHRKSVYWHVIGMGTTPEVHSIFLEGHTFLVRNHRQASLEISPITFLTAQTLLMDLGQFLLFCHISSHQHDGMEAYVKVDSCPEEPQLRMKNNEEAEDYDDDLTDSEMDVVRFDDDNSPSFIQIRSVAKKHPKTWVHYIAAEEEDWDYAPLVLAPDDRSYKSQYLNNGPQRIGRKYKKVRFMAYTDETFKTREAIQHESGILGPLLYGEVGDTLLIIFKNQASRPYNIYPHGITDVRPLYSRRLPKGVKHLKDFPILPGEIFKYKWTVTVEDGPTKSDPRCLTRYYSSFVNMERDLASGLIGPLLICYKESVDQRGNQIMSDKRNVILFSVFDENRSWYLTENIQRFLPNPAGVQLEDPEFQASNIMHSINGYVFDSLQLSVCLHEVAYWYILSIGAQTDFLSVFFSGYTFKHKMVYEDTLTLFPFSGETVFMSMENPGLWILGCHNSDFRNRGMTALLKVSSCDKNTGDYYEDSYEDISAYLLSKNNAIEPRSFSQNPPVLKRHQREITRTTLQSDQEEIDYDDTISVEMKKEDFDIYDEDENQSPRSFQKKTRHYFIAAVERLWDYGMSSSPHVLRNRAQSGSVPQFKKVVFQEFTDGSFTQPLYRGELNEHLGLLGPYIRAEVEDNIMVTFRNQASRPYSFYSSLISYEEDQRQGAEPRKNFVKPNETKTYFWKVQHHMAPTKDEFDCKAWAYFSDVDLEKDVHSGLIGPLLVCHTNTLNPAHGRQVTVQEFALFFTIFDETKSWYFTENMERNCRAPCNIQMEDPTFKENYRFHAINGYIMDTLPGLVMAQDQRIRWYLLSMGSNENIHSIHFSGHVFTVRKKEEYKMALYNLYPGVFETVEMLPSKAGIWRVECLIGEHLHAGMSTLFLVYSNKCQTPLGMASGHIRDFQITASGQYGQWAPKLARLHYSGSINAWSTKEPFSWIKVDLLAPMIIHGIKTQGARQKFSSLYISQFIIMYSLDGKKWQTYRGNSTGTLMVFFGNVDSSGIKHNIFNPPIIARYIRLHPTHYSIRSTLRMELMGCDLNSCSMPLGMESKAISDAQITASSYFTNMFATWSPSKARLHLQGRSNAWRPQVNNPKEWLQVDFQKTMKVTGVTTQGVKSLLTSMYVKEFLISSSQDGHQWTLFFQNGKVKVFQGNQDSFTPVVNSLDPPLLTRYLRIHPQSWVHQIALRMEVLGCEAQDLYGAPASSHHHHHHHH

SEQ ID NO: 1476 - DNA, 4359 bp, synthetic construct
  misc_feature 1..4359: note = Description of Artificial Sequence: Synthetic polynucleotide
  source 1..4359: mol_type = other DNA
gccaccagaagatactacctgggtgcagtggaactgtcatgggactatatgcaaagtgatctcggtgagctgcctgtggacgcaagatttcctcctagagtgccaaaatcttttccattcaacacctcagtcgtgtacaaaaagactctgtttgtagaattcacggatcaccttttcaacatcgctaagccaaggccaccctggatgggtctgctaggtcctaccatccaggctgaggtttatgatacagtggtcattacacttaagaacatggcttcccatcctgtcagtcttcatgctgttggtgtatcctactggaaagcttctgagggagctgaatatgatgatcagaccagtcaaagggagaaagaagatgataaagtcttccctggtggaagccatacatatgtctggcaggtcctgaaagagaatggtccaatggcctctgacccactgtgccttacctactcatatctttctcatgtggacctggtaaaagacttgaattcaggcctcattggagccctactagtatgtagagaagggagtctggccaaggaaaagacacagaccttgcacaaatttatactactttttgctgtatttgatgaagggaaaagttggcactcagaaacaaagaactccttgatgcaggatagggatgctgcatctgctcgggcctggcctaaaatgcacacagtcaatggttatgtaaacaggtctctgccaggtctgattggatgccacaggaaatcagtctattggcatgtgattggaatgggcaccactcctgaagtgcactcaatattcctcgaaggtcacacatttcttgtgaggaaccatcgccaggctagcttggaaatctcgccaataactttccttactgctcaaacactcttgatggaccttggacagtttctactgttttgtcatatctcttcccaccaacatgatggcatggaagcttatgtcaaagtagacagctgtccagaggaaccccaactacgaatgaaaaataatgaagaagcggaagactatgatgatgatcttactgattctgaaatggatgtggtcaggtttgatgatgacaactctccttcctttatccaaattcgctcagttgccaagaagcatcctaaaacttgggtacattacattgctgctgaagaggaggactgggactatgctcccttagtcctcgcccccgatgacagaagttataaaagtcaatatttgaacaatggccctcagcggattggtaggaagtacaaaaaagtccgatttatggcatacacagatgaaacctttaagactcgtgaagctattcagcatgaatcaggaatcttgggacctttactttatggggaagttggagacacactgttgattatatttaagaatcaagcaagcagaccatataacatctaccctcacggaatcactgatgtccgtcctttgtattcaaggagattaccaaaaggtgtaaaacatttgaaggattttccaattctgccaggagaaatattcaaatataaatggacagtgactgtagaagatgggccaactaaatcagatcctcggtgcctgacccgctattactctagtttcgttaatatggagagagatctagcttcaggactcattggccctctcctcatctgctacaaagaatctgtagatcaaagaggaaaccagataatgtcagacaagaggaatgtcatcctgttttctgtatttgatgagaaccgaagctggtacctcacagagaatatacaacgctttctccccaatccagctggagtgcagcttgaggatccagagttccaagcctccaacatcatgcacagcatcaatggctatgtttttgatagtttgcagttgtcagtttgtttgcatgaggtggcatactggtacattctaagcattggagcacagactgacttcctttctgtcttcttctctggatataccttcaaacacaaaatggtctatgaagacacactcaccctattcccattctcaggagaaactgtcttcatgtcgatggaaaacccaggtctatggattctggggtgccacaactcagactttcggaacagaggcatgaccgccttactgaaggtttctagttgtgacaagaacactggtgattattacgaggacagttatgaagatatttcagcatacttgctgagtaaaaacaatgccattgaaccaagaagcttctctcaaaacccaccagtcttgaaacgccatcaacgggaaataactcgtactactcttcagtcagatcaagaggaaatcgattatgatgataccatatcagttgaaatgaagaaggaagattttgacatttatgatgaggatgaaaatcagagcccccgcagctttcaaaagaaaacacgacactattttattgctgcagtggagaggctctgggattatgggatgagtagctccccacatgttctaagaaacagggctcagagtggcagtgtccctcagttcaagaaagttgttttccaggaatttactgatggctcctttactcagcccttataccgtggagaactaaatgaacatttgggactcctggggccatatataagagcagaagttgaagataatatcatggtaactttcagaaatcaggcctctcgtccctattccttctattctagccttatttcttatgaggaagatcagaggcaaggagcagaacctagaaaaaactttgtcaagcctaatgaaaccaaaacttacttttggaaagtgcaacatcatatggcacccactaaagatgagtttgactgcaaagcctgggcttatttctctgatgttgacctggaaaaagatgtgcactcaggcctgattggaccccttctggtctgccacactaacacactgaaccctgctcatgggagacaagtgacagtacaggaatttgctctgtttttcaccatctttgatgagaccaaaagctggtacttcactgaaaatatggaaagaaactgcagggctccctgcaatatccagatggaagatcccacttttaaagagaattatcgcttccatgcaatcaatggctacataatggatacactacctggcttagtaatggctcaggatcaaaggattcgatggtatctgctcagcatgggcagcaatgaaaacatccattctattcatttcagtggacatgtgttcactgtacgaaaaaaagaggagtataaaatggcactgtacaatctctatccaggtgtttttgagacagtggaaatgttaccatccaaagctggaatttggcgggtggaatgccttattggcgagcatctacatgctgggatgagcacactttttctggtgtacagcaataagtgtcagactcccctgggaatggcttctggacacattagagattttcagattacagcttcaggacaatatggacagtgggccccaaagctggccagacttcattattccggatcaatcaatgcctggagcaccaaggagcccttttcttggatcaaggtggatctgttggcaccaatgattattcacggcatcaagacccagggtgcccgtcagaagttctccagcctctacatctctcagtttatcatcatgtatagtcttgatgggaagaagtggcagacttatcgaggaaattccactggaaccttaatggtcttctttggcaatgtggattcatctgggataaaacacaatatttttaaccctccaattattgctcgatacatccgtttgcacccaactcattatagcattcgcagcactcttcgcatggagttgatgggctgtgatttaaatagttgcagcatgccattgggaatggagagtaaagcaatatcagatgcacagattactgcttcatcctactttaccaatatgtttgccacctggtctccttcaaaagctcgacttcacctccaagggaggagtaatgcctggagacctcaggtgaataatccaaaagagtggctgcaagtggacttccagaagacaatgaaagtcacaggagtaactactcagggagtaaaatctctgcttaccagcatgtatgtgaaggagttcctcatctccagcagtcaagatggccatcagtggactctcttttttcagaatggcaaagtaaaggtttttcagggaaatcaagactccttcacacctgtggtgaactctctagacccaccgttactgactcgctaccttcgaattcacccccagagttgggtgcaccagattgccctgaggatggaggttctgggctgcgaggcacaggacctctacggcgcgccagcctcgagccatcaccatcatcaccatcaccattga

SEQ ID NO: 1477 - protein, 1449 aa, synthetic construct
  REGION 1..1449: note = Description of Artificial Sequence: Synthetic polypeptide
ATRRYYLGAVELSWDYMQSDLGELPVDARFPPRVPKSFPFNTSVVYKKTLFVEFTDHLFNIAKPRPPWMGLLGPTIQAEVYDTVVITLKNMASHPVSLHAVGVSYWKASEGAEYDDQTSQREKEDDKVFPGGSHTYVWQVLKENGPMASDPLCLTYSYLSHVDLVKDLNSGLIGALLVCREGSLAKEKTQTLHKFILLFAVFDEGKSWHSETKNSLMQDRDAASARAWPKMHTVNGYVNRSLPGLIGCHRKSVYWHVIGMGTTPEVHSIFLEGHTFLVRNHRQASLEISPITFLTAQTLLMDLGQFLLFCHISSHQHDGMEAYVKVDSCPEEPQLRMKNNEEAEDYDDDLTDSEMDVVRFDDDNSPSFIQIRSVAKKHPKTWVHYIAAEEEDWDYAPLVLAPDDRSYKSQYLNNGPQRIGRKYKKVRFMAYTDETFKTREAIQHESGILGPLLYGEVGDTLLIIFKNQASRPYNIYPHGITDVRPLYSRRLPKGVKHLKDFPILPGEIFKYKWTVTVEDGPTKSDPRCLTRYYSSFVNMERDLASGLIGPLLICYKESVDQRGNQIMSDKRNVILFSVFDENRSWYLTENIQRFLPNPAGVQLEDPEFQASNIMHSINGYVFDSLQLSVCLHEVAYWYILSIGAQTDFLSVFFSGYTFKHKMVYEDTLTLFPFSGETVFMSMENPGLWILGCHNSDFRNRGMTALLKVSSCDKNTGDYYEDSYEDISAYLLSKNNAIEPRSFSQNPPVLKRHQREITRTTLQSDQEEIDYDDTISVEMKKEDFDIYDEDENQSPRSFQKKTRHYFIAAVERLWDYGMSSSPHVLRNRAQSGSVPQFKKVVFQEFTDGSFTQPLYRGELNEHLGLLGPYIRAEVEDNIMVTFRNQASRPYSFYSSLISYEEDQRQGAEPRKNFVKPNETKTYFWKVQHHMAPTKDEFDCKAWAYFSDVDLEKDVHSGLIGPLLVCHTNTLNPAHGRQVTVQEFALFFTIFDETKSWYFTENMERNCRAPCNIQMEDPTFKENYRFHAINGYIMDTLPGLVMAQDQRIRWYLLSMGSNENIHSIHFSGHVFTVRKKEEYKMALYNLYPGVFETVEMLPSKAGIWRVECLIGEHLHAGMSTLFLVYSNKCQTPLGMASGHIRDFQITASGQYGQWAPKLARLHYSGSINAWSTKEPFSWIKVDLLAPMIIHGIKTQGARQKFSSLYISQFIIMYSLDGKKWQTYRGNSTGTLMVFFGNVDSSGIKHNIFNPPIIARYIRLHPTHYSIRSTLRMELMGCDLNSCSMPLGMESKAISDAQITASSYFTNMFATWSPSKARLHLQGRSNAWRPQVNNPKEWLQVDFQKTMKVTGVTTQGVKSLLTSMYVKEFLISSSQDGHQWTLFFQNGKVKVFQGNQDSFTPVVNSLDPPLLTRYLRIHPQSWVHQIALRMEVLGCEAQDLYASSHHHHHHHH

SEQ ID NO: 1478 - DNA, 4350 bp, synthetic construct
  misc_feature 1..4350: note = Description of Artificial Sequence: Synthetic polynucleotide
  source 1..4350: mol_type = other DNA
gccaccagaagatactacctgggtgcagtggaactgtcatgggactatatgcaaagtgatctcggtgagctgcctgtggacgcaagatttcctcctagagtgccaaaatcttttccattcaacacctcagtcgtgtacaaaaagactctgtttgtagaattcacggatcaccttttcaacatcgctaagccaaggccaccctggatgggtctgctaggtcctaccatccaggctgaggtttatgatacagtggtcattacacttaagaacatggcttcccatcctgtcagtcttcatgctgttggtgtatcctactggaaagcttctgagggagctgaatatgatgatcagaccagtcaaagggagaaagaagatgataaagtcttccctggtggaagccatacatatgtctggcaggtcctgaaagagaatggtccaatggcctctgacccactgtgccttacctactcatatctttctcatgtggacctggtaaaagacttgaattcaggcctcattggagccctactagtatgtagagaagggagtctggccaaggaaaagacacagaccttgcacaaatttatactactttttgctgtatttgatgaagggaaaagttggcactcagaaacaaagaactccttgatgcaggatagggatgctgcatctgctcgggcctggcctaaaatgcacacagtcaatggttatgtaaacaggtctctgccaggtctgattggatgccacaggaaatcagtctattggcatgtgattggaatgggcaccactcctgaagtgcactcaatattcctcgaaggtcacacatttcttgtgaggaaccatcgccaggctagcttggaaatctcgccaataactttccttactgctcaaacactcttgatggaccttggacagtttctactgttttgtcatatctcttcccaccaacatgatggcatggaagcttatgtcaaagtagacagctgtccagaggaaccccaactacgaatgaaaaataatgaagaagcggaagactatgatgatgatcttactgattctgaaatggatgtggtcaggtttgatgatgacaactctccttcctttatccaaattcgctcagttgccaagaagcatcctaaaacttgggtacattacattgctgctgaagaggaggactgggactatgctcccttagtcctcgcccccgatgacagaagttataaaagtcaatatttgaacaatggccctcagcggattggtaggaagtacaaaaaagtccgatttatggcatacacagatgaaacctttaagactcgtgaagctattcagcatgaatcaggaatcttgggacctttactttatggggaagttggagacacactgttgattatatttaagaatcaagcaagcagaccatataacatctaccctcacggaatcactgatgtccgtcctttgtattcaaggagattaccaaaaggtgtaaaacatttgaaggattttccaattctgccaggagaaatattcaaatataaatggacagtgactgtagaagatgggccaactaaatcagatcctcggtgcctgacccgctattactctagtttcgttaatatggagagagatctagcttcaggactcattggccctctcctcatctgctacaaagaatctgtagatcaaagaggaaaccagataatgtcagacaagaggaatgtcatcctgttttctgtatttgatgagaaccgaagctggtacctcacagagaatatacaacgctttctccccaatccagctggagtgcagcttgaggatccagagttccaagcctccaacatcatgcacagcatcaatggctatgtttttgatagtttgcagttgtcagtttgtttgcatgaggtggcatactggtacattctaagcattggagcacagactgacttcctttctgtcttcttctctggatataccttcaaacacaaaatggtctatgaagacacactcaccctattcccattctcaggagaaactgtcttcatgtcgatggaaaacccaggtctatggattctggggtgccacaactcagactttcggaacagaggcatgaccgccttactgaaggtttctagttgtgacaagaacactggtgattattacgaggacagttatgaagatatttcagcatacttgctgagtaaaaacaatgccattgaaccaagaagcttctctcaaaacccaccagtcttgaaacgccatcaacgggaaataactcgtactactcttcagtcagatcaagaggaaatcgattatgatgataccatatcagttgaaatgaagaaggaagattttgacatttatgatgaggatgaaaatcagagcccccgcagctttcaaaagaaaacacgacactattttattgctgcagtggagaggctctgggattatgggatgagtagctccccacatgttctaagaaacagggctcagagtggcagtgtccctcagttcaagaaagttgttttccaggaatttactgatggctcctttactcagcccttataccgtggagaactaaatgaacatttgggactcctggggccatatataagagcagaagttgaagataatatcatggtaactttcagaaatcaggcctctcgtccctattccttctattctagccttatttcttatgaggaagatcagaggcaaggagcagaacctagaaaaaactttgtcaagcctaatgaaaccaaaacttacttttggaaagtgcaacatcatatggcacccactaaagatgagtttgactgcaaagcctgggcttatttctctgatgttgacctggaaaaagatgtgcactcaggcctgattggaccccttctggtctgccacactaacacactgaaccctgctcatgggagacaagtgacagtacaggaatttgctctgtttttcaccatctttgatgagaccaaaagctggtacttcactgaaaatatggaaagaaactgcagggctccctgcaatatccagatggaagatcccacttttaaagagaattatcgcttccatgcaatcaatggctacataatggatacactacctggcttagtaatggctcaggatcaaaggattcgatggtatctgctcagcatgggcagcaatgaaaacatccattctattcatttcagtggacatgtgttcactgtacgaaaaaaagaggagtataaaatggcactgtacaatctctatccaggtgtttttgagacagtggaaatgttaccatccaaagctggaatttggcgggtggaatgccttattggcgagcatctacatgctgggatgagcacactttttctggtgtacagcaataagtgtcagactcccctgggaatggcttctggacacattagagattttcagattacagcttcaggacaatatggacagtgggccccaaagctggccagacttcattattccggatcaatcaatgcctggagcaccaaggagcccttttcttggatcaaggtggatctgttggcaccaatgattattcacggcatcaagacccagggtgcccgtcagaagttctccagcctctacatctctcagtttatcatcatgtatagtcttgatgggaagaagtggcagacttatcgaggaaattccactggaaccttaatggtcttctttggcaatgtggattcatctgggataaaacacaatatttttaaccctccaattattgctcgatacatccgtttgcacccaactcattatagcattcgcagcactcttcgcatggagttgatgggctgtgatttaaatagttgcagcatgccattgggaatggagagtaaagcaatatcagatgcacagattactgcttcatcctactttaccaatatgtttgccacctggtctccttcaaaagctcgacttcacctccaagggaggagtaatgcctggagacctcaggtgaataatccaaaagagtggctgcaagtggacttccagaagacaatgaaagtcacaggagtaactactcagggagtaaaatctctgcttaccagcatgtatgtgaaggagttcctcatctccagcagtcaagatggccatcagtggactctcttttttcagaatggcaaagtaaaggtttttcagggaaatcaagactccttcacacctgtggtgaactctctagacccaccgttactgactcgctaccttcgaattcacccccagagttgggtgcaccagattgccctgaggatggaggttctgggctgcgaggcacaggacctctacgcctcgagccatcaccatcatcaccatcaccattga

SEQ ID NO: 1479 - protein, 1899 aa, synthetic construct
  REGION 1..1899: note = Description of Artificial Sequence: Synthetic polypeptide
ATRRYYLGAVELSWDYMQSDLGELPVGAPGSSPSASTGTGPGSSPSASTGTGPGASPGTSSTGSPGASPGTSSTGSPGSSTPSGATGSPGSSPSASTGTGPGASPGTSSTGSPGSSPSASTGTGPGTPGSGTASSSPGSSTPSGATGSPGSSTPSGATGSPGASPGTSSTGSPASSDARFPPRVPKSFPFNTSVVYKKTLFVEFTDHLFNIAKPRPPWMGLLGPTIQAEVYDTVVITLKNMASHPVSLHAVGVSYWKASEGAEYDDQTSQREKEDDKVFPGGSHTYVWQVLKENGPMASDPLCLTYSYLSHVDLVKDLNSGLIGALLVCREGSLAKEKTQTLHKFILLFAVFDEGKSWHSETKNSLMQDRDAASARAWPKMHTVNGYVNRSLPGLIGCHRKSVYWHVIGMGTTPEVHSIFLEGHTFLVRNHRQASLEISPITFLTAQTLLMDLGQFLLFCHISSHQHDGMEAYVKVDSCPEEPQLRMKNNEEAEDYDDDLTDSEMDVVRFDDDNSPSFIQIRSVAKKHPKTWVHYIAAEEEDWDYAPLVLAPDDRSYKSQYLNNGPQRIGRKYKKVRFMAYTDETFKTREAIQHESGILGPLLYGEVGDTLLIIFKNQASRPYNIYPHGITDVRPLYSRRLPKGVKHLKDFPILPGEIFKYKWTVTVEDGPTKSDPRCLTRYYSSFVNMERDLASGLIGPLLICYKESVDQRGNQIMSDKRNVILFSVFDENRSWYLTENIQRFLPNPAGVQLEDPEFQASNIMHSINGYVFDSLQLSVCLHEVAYWYILSIGAQTDFLSVFFSGYTFKHKMVYEDTLTLFPFSGETVFMSMENPGLWILGCHNSDFRNRGMTALLKVSSCDKNTGDYYEDSYEDISAYLLSKNNAIEPRSFSQNPPVLKRHQREITRTTLQGAPGTPGSGTASSSPGASPGTSSTGSPGASPGTSSTGSPGASPGTSSTGSPGSSPSASTGTGPGTPGSGTASSSPGASPGTSSTGSPGASPGTSSTGSPGASPGTSSTGSPGSSTPSGATGSPGSSTPSGATGSPGASPGTSSTGSPASSSDQEEIDYDDTISVEMKKEDFDIYDEDENQSPRSFQKKTRHYFIAAVERLWDYGMSSSPHVLRNRAQSGSVPQFKKVVFQEFTDGSFTQPLYRGELNEHLGLLGPYIRAEVEDNIMVTFRNQASRPYSFYSSLISYEEDQRQGAEPRKNFVKPNETKTYFWKVQHHMAPTKDEFDCKAWAYFSDVDLEKDVHSGLIGPLLVCHTNTLNPAHGRQVTVQEFALFFTIFDETKSWYFTENMERNCRGAPTSESATPESGPGSEPATSGSETPGTSESATPESGPGSEPATSGSETPGTSESATPESGPGTSTEPSEGSAPGTSESATPESGPGSPAGSPTSTEEGSPAGSPTSTEEGSPAGSPTSTEEGTSESATPESGPGTSTEPSEGSAPGASSAPCNIQMEDPTFKENYRFHAINGYIMDTLPGLVMAQDQRIRWYLLSMGSNENIHSIHFSGHVFTVRKKEEYKMALYNLYPGVFETVEMLPSKAGIWRVECLIGEHLHAGMSTLFLVYSNKCQTPLGMASGHIRDFQITASGQYGQWAPKLARLHYSGSINAWSTKEPFSWIKVDLLAPMIIHGIKTQGARQKFSSLYISQFIIMYSLDGKKWQTYRGNSTGTLMVFFGNVDSSGIKHNIFNPPIIARYIRLHPTHYSIRSTLRMELMGCDLNSCSMPLGMESKAISDAQITASSYFTNMFATWSPSKARLHLQGRSNAWRPQVNNPKEWLQVDFQKTMKVTGVTTQGVKSLLTSMYVKEFLISSSQDGHQWTLFFQNGKVKVFQGNQDSFTPVVNSLDPPLLTRYLRIHPQSWVHQIALRMEVLGCEAQDLYASSHHHHHHHH

SEQ ID NO: 1480 - DNA, 5700 bp, synthetic construct
  misc_feature 1..5700: note = Description of Artificial Sequence: Synthetic polynucleotide
  source 1..5700: mol_type = other DNA
gccaccagaagatactacctgggtgcagtggaactgtcatgggactatatgcaaagtgatctcggtgagctgcctgtgggcgcgccaggctccagcccctccgcgagcacgggaaccggaccaggttcgtcaccctcagcatcaacggggacgggaccgggggcgtcaccaggaacgtcctccaccggctcgccgggtgcatcacccggaacgtcatcgaccggatcgccagggagctcgacgccatcaggcgcaacaggatcacctggctcaagccctagcgcgtcaaccggcacgggtccgggtgcctcccctggcacgtccagcaccggatcacccggatcgagcccatccgcctcaaccggaaccggacccggtacaccagggtcgggaacagcctcctcgtcaccaggctcctcaaccccctcgggagccacgggttcgcccggttcgtcaacgccttccggagcaactggtagccccggagcatcgccaggaacttcgagcacggggtcgcccgcctcgagcgacgcaagatttcctcctagagtgccaaaatcttttccattcaacacctcagtcgtgtacaaaaagactctgtttgtagaattcacggatcaccttttcaacatcgctaagccaaggccaccctggatgggtctgctaggtcctaccatccaggctgaggtttatgatacagtggtcattacacttaagaacatggcttcccatcctgtcagtcttcatgctgttggtgtatcctactggaaagcttctgagggagctgaatatgatgatcagaccagtcaaagggagaaagaagatgataaagtcttccctggtggaagccatacatatgtctggcaggtcctgaaagagaatggtccaatggcctctgacccactgtgccttacctactcatatctttctcatgtggacctggtaaaagacttgaattcaggcctcattggagccctactagtatgtagagaagggagtctggccaaggaaaagacacagaccttgcacaaatttatactactttttgctgtatttgatgaagggaaaagttggcactcagaaacaaagaactccttgatgcaggatagggatgctgcatctgctcgggcctggcctaaaatgcacacagtcaatggttatgtaaacaggtctctgccaggtctgattggatgccacaggaaatcagtctattggcatgtgattggaatgggcaccactcctgaagtgcactcaatattcctcgaaggtcacacatttcttgtgaggaaccatcgccaggctagcttggaaatctcgccaataactttccttactgctcaaacactcttgatggaccttggacagtttctactgttttgtcatatctcttcccaccaacatgatggcatggaagcttatgtcaaagtagacagctgtccagaggaaccccaactacgaatgaaaaataatgaagaagcggaagactatgatgatgatcttactgattctgaaatggatgtggtcaggtttgatgatgacaactctccttcctttatccaaattcgctcagttgccaagaagcatcctaaaacttgggtacattacattgctgctgaagaggaggactgggactatgctcccttagtcctcgcccccgatgacagaagttataaaagtcaatatttgaacaatggccctcagcggattggtaggaagtacaaaaaagtccgatttatggcatacacagatgaaacctttaagactcgtgaagctattcagcatgaatcaggaatcttgggacctttactttatggggaagttggagacacactgttgattatatttaagaatcaagcaagcagaccatataacatctaccctcacggaatcactgatgtccgtcctttgtattcaaggagattaccaaaaggtgtaaaacatttgaaggattttccaattctgccaggagaaatattcaaatataaatggacagtgactgtagaagatgggccaactaaatcagatcctcggtgcctgacccgctattactctagtttcgttaatatggagagagatctagcttcaggactcattggccctctcctcatctgctacaaagaatctgtagatcaaagaggaaaccagataatgtcagacaagaggaatgtcatcctgttttctgtatttgatgagaaccgaagctggtacctcacagagaatatacaacgctttctccccaatccagctggagtgcagcttgaggatccagagttccaagcctccaacatcatgcacagcatcaatggctatgtttttgatagtttgcagttgtcagtttgtttgcatgaggtggcatactggtacattctaagcattggagcacagactgacttcctttctgtcttcttctctggatataccttcaaacacaaaatggtctatgaagacacactcaccctattcccattctcaggagaaactgtcttcatgtcgatggaaaacccaggtctatggattctggggtgccacaactcagactttcggaacagaggcatgaccgccttactgaaggtttctagttgtgacaagaacactggtgattattacgaggacagttatgaagatatttcagcatacttgctgagtaaaaacaatgccattgaaccaagaagcttctctcaaaacccaccagtcttgaaacgccatcaacgggaaataactcgtactactcttcagggcgcgccaggtacacccggatcgggtacagcgtcatcgagccccggtgcgtcacctggtacgtcgagcacggggtcgccaggggcgtcccctgggacgtcctcaacaggctcgcccggtgcgtcacccggcacgtcgtccacgggttcacctggtagctccccttccgcgtccactggcaccgggcctggaactccggggagcggcacagcgagctcgtcgccgggagcatcgcctgggacatcgagcaccgggtcgccaggagcatcgcccggaacatccagcacaggaagccccggcgcgtcgcccgggacatcaagcacaggttccccgggatcgagcacgccgtccggagccactggatcaccagggagctcgacaccttccggcgcaacgggatcgcccggagccagcccgggtacgtcaagcactggctcccctgcctcgagctcagatcaagaggaaatcgattatgatgataccatatcagttgaaatgaagaaggaagattttgacatttatgatgaggatgaaaatcagagcccccgcagctttcaaaagaaaacacgacactattttattgctgcagtggagaggctctgggattatgggatgagtagctccccacatgttctaagaaacagggctcagagtggcagtgtccctcagttcaagaaagttgttttccaggaatttactgatggctcctttactcagcccttataccgtggagaactaaatgaacatttgggactcctggggccatatataagagcagaagttgaagataatatcatggtaactttcagaaatcaggcctctcgtccctattccttctattctagccttatttcttatgaggaagatcagaggcaaggagcagaacctagaaaaaactttgtcaagcctaatgaaaccaaaacttacttttggaaagtgcaacatcatatggcacccactaaagatgagtttgactgcaaagcctgggcttatttctctgatgttgacctggaaaaagatgtgcactcaggcctgattggaccccttctggtctgccacactaacacactgaaccctgctcatgggagacaagtgacagtacaggaatttgctctgtttttcaccatctttgatgagaccaaaagctggtacttcactgaaaatatggaaagaaactgcaggggcgcgccaacgtccgaaagtgctacccctgagtcaggccctggtagtgagcctgccacaagcggaagcgaaactccggggacctcagagtctgccactcccgaatcggggccaggctctgaaccggccacttcagggagcgaaacaccaggaacatcggagagcgctaccccggagagcgggccaggaactagtactgagcctagcgagggaagtgcacctggtacaagcgagtccgccacacccgagtctggccctggctctccagcgggctcacccacgagcactgaagagggctctcccgctggcagcccaacgtcgacagaagaaggatcaccagcaggctcccccacatcaacagaggagggtacatcagaatctgctactcccgagagtggacccggtacctccactgagcccagcgaggggagtgcaccaggtgcctcgagcgctccctgcaatatccagatggaagatcccacttttaaagagaattatcgcttccatgcaatcaatggctacataatggatacactacctggcttagtaatggctcaggatcaaaggattcgatggtatctgctcagcatgggcagcaatgaaaacatccattctattcatttcagtggacatgtgttcactgtacgaaaaaaagaggagtataaaatggcactgtacaatctctatccaggtgtttttgagacagtggaaatgttaccatccaaagctggaatttggcgggtggaatgccttattggcgagcatctacatgctgggatgagcacactttttctggtgtacagcaataagtgtcagactcccctgggaatggcttctggacacattagagattttcagattacagcttcaggacaatatggacagtgggccccaaagctggccagacttcattattccggatcaatcaatgcctggagcaccaaggagcccttttcttggatcaaggtggatctgttggcaccaatgattattcacggcatcaagacccagggtgcccgtcagaagttctccagcctctacatctctcagtttatcatcatgtatagtcttgatgggaagaagtggcagacttatcgaggaaattccactggaaccttaatggtcttctttggcaatgtggattcatctgggataaaacacaatatttttaaccctccaattattgctcgatacatccgtttgcacccaactcattatagcattcgcagcactcttcgcatggagttgatgggctgtgatttaaatagttgcagcatgccattgggaatggagagtaaagcaatatcagatgcacagattactgcttcatcctactttaccaatatgtttgccacctggtctccttcaaaagctcgacttcacctccaagggaggagtaatgcctggagacctcaggtgaataatccaaaagagtggctgcaagtggacttccagaagacaatgaaagtcacaggagtaactactcagggagtaaaatctctgcttaccagcatgtatgtgaaggagttcctcatctccagcagtcaagatggccatcagtggactctcttttttcagaatggcaaagtaaaggtttttcagggaaatcaagactccttcacacctgtggtgaactctctagacccaccgttactgactcgctaccttcgaattcacccccagagttgggtgcaccagattgccctgaggatggaggttctgggctgcgaggcacaggacctctacgcctcgagccatcaccatcatcaccatcaccattga

SEQ ID NO: 1481 - protein, 1596 aa, synthetic construct
  REGION 1..1596: note = Description of Artificial Sequence: Synthetic polypeptide
ATRRYYLGAVELSWDYMQSDLGELPVDARFPPRVPKSFPFNTSVVYKKTLFVEFTDHLFNIAKPRPPWMGLLGPTIQAEVYDTVVITLKNMASHPVSLHAVGVSYWKASEGAEYDDQTSQREKEDDKVFPGGSHTYVWQVLKENGPMASDPLCLTYSYLSHVDLVKDLNSGLIGALLVCREGSLAKEKTQTLHKFILLFAVFDEGKSWHSETKNSLMQDRDAASARAWPKMHTVNGYVNRSLPGLIGCHRKSVYWHVIGMGTTPEVHSIFLEGHTFLVRNHRQASLEISPITFLTAQTLLMDLGQFLLFCHISSHQHDGMEAYVKVDSCPEEPQLRMKNNEEAEDYDDDLTDSEMDVVRFDDDNSPSFIQIRSVAKKHPKTWVHYIAAEEEDWDYAPLVLAPDDRSYKSQYLNNGPQRIGRKYKKVRFMAYTDETFKTREAIQHESGILGPLLYGEVGDTLLIIFKNQASRPYNIYPHGITDVRPLYSRRLPKGVKHLKDFPILPGEIFKYKWTVTVEDGPTKSDPRCLTRYYSSFVNMERDLASGLIGPLLICYKESVDQRGNQIMSDKRNVILFSVFDENRSWYLTENIQRFLPNPAGVQLEDPEFQASNIMHSINGYVFDSLQLSVCLHEVAYWYILSIGAQTDFLSVFFSGYTFKHKMVYEDTLTLFPFSGETVFMSMENPGLWILGCHNSDFRNRGMTALLKVSSCDKNTGDYYEDSYEDISAYLLSKNNAIEPRSFSQNPPVLKRHQREITRTTLQSDQEEIDYDDTISVEMKKEDFDIYDEDENQSPRSFQKKTRHYFIAAVERLWDYGMSSSPHVLRNRAQSGSVPQFKKVVFQEFTDGSFTQPLYRGELNEHLGLLGPYIRAEVEDNIMVTFRNQASRPYSFYSSLISYEEDQRQGAEPRKNFVKPNETKTYFWKVQHHMAPTKDEFDCKAWAYFSDVDLEKDVHSGLIGPLLVCHTNTLNPAHGRQVTVQEFALFFTIFDETKSWYFTENMERNCRAPCNIQMEDPTFKENYRFHAINGYIMDTLPGLVMAQDQRIRWYLLSMGSNENIHSIHFSGHVFTVRKKEEYKMALYNLYPGVFETVEMLPSKAGIWRVECLIGEHLHAGMSTLFLVYSNKCQTPLGMASGHIRDFQITASGQYGQWAPKLARLHYSGSINAWSTKEPFSWIKVDLLAPMIIHGIKTQGARQKFSSLYISQFIIMYSLDGKKWQTYRGNSTGTLMVFFGNVDSSGIKHNIFNPPIIARYIRLHPTHYSIRSTLRMELMGCDLNSCSMPLGMESKAISDAQITASSYFTNMFATWSPSKARLHLQGRSNAWRPQVNNPKEWLQVDFQKTMKVTGVTTQGVKSLLTSMYVKEFLISSSQDGHQWTLFFQNGKVKVFQGNQDSFTPVVNSLDPPLLTRYLRIHPQSWVHQIALRMEVLGCEAQDLYGAPTSTEPSEGSAPGTSESATPESGPGTSESATPESGPGTSESATPESGPGSEPATSGSETPGSEPATSGSETPGSPAGSPTSTEEGTSTEPSEGSAPGTSTEPSEGSAPGSEPATSGSETPGTSESATPESGPGTSTEPSEGSAPGASSHHHHHHHH

SEQ ID NO: 1482 - DNA, 4791 bp, synthetic construct
  misc_feature 1..4791: note = Description of Artificial Sequence: Synthetic polynucleotide
  source 1..4791: mol_type = other DNA
gccaccagaagatactacctgggtgcagtggaactgtcatgggactatatgcaaagtgatctcggtgagctgcctgtggacgcaagatttcctcctagagtgccaaaatcttttccattcaacacctcagtcgtgtacaaaaagactctgtttgtagaattcacggatcaccttttcaacatcgctaagccaaggccaccctggatgggtctgctaggtcctaccatccaggctgaggtttatgatacagtggtcattacacttaagaacatggcttcccatcctgtcagtcttcatgctgttggtgtatcctactggaaagcttctgagggagctgaatatgatgatcagaccagtcaaagggagaaagaagatgataaagtcttccctggtggaagccatacatatgtctggcaggtcctgaaagagaatggtccaatggcctctgacccactgtgccttacctactcatatctttctcatgtggacctggtaaaagacttgaattcaggcctcattggagccctactagtatgtagagaagggagtctggccaaggaaaagacacagaccttgcacaaatttatactactttttgctgtatttgatgaagggaaaagttggcactcagaaacaaagaactccttgatgcaggatagggatgctgcatctgctcgggcctggcctaaaatgcacacagtcaatggttatgtaaacaggtctctgccaggtctgattggatgccacaggaaatcagtctattggcatgtgattggaatgggcaccactcctgaagtgcactcaatattcctcgaaggtcacacatttcttgtgaggaaccatcgccaggctagcttggaaatctcgccaataactttccttactgctcaaacactcttgatggaccttggacagtttctactgttttgtcatatctcttcccaccaacatgatggcatggaagcttatgtcaaagtagacagctgtccagaggaaccccaactacgaatgaaaaataatgaagaagcggaagactatgatgatgatcttactgattctgaaatggatgtggtcaggtttgatgatgacaactctccttcctttatccaaattcgctcagttgccaagaagcatcctaaaacttgggtacattacattgctgctgaagaggaggactgggactatgctcccttagtcctcgcccccgatgacagaagttataaaagtcaatatttgaacaatggccctcagcggattggtaggaagtacaaaaaagtccgatttatggcatacacagatgaaacctttaagactcgtgaagctattcagcatgaatcaggaatcttgggacctttactttatggggaagttggagacacactgttgattatatttaagaatcaagcaagcagaccatataacatctaccctcacggaatcactgatgtccgtcctttgtattcaaggagattaccaaaaggtgtaaaacatttgaaggattttccaattctgccaggagaaatattcaaatataaatggacagtgactgtagaagatgggccaactaaatcagatcctcggtgcctgacccgctattactctagtttcgttaatatggagagagatctagcttcaggactcattggccctctcctcatctgctacaaagaatctgtagatcaaagaggaaaccagataatgtcagacaagaggaatgtcatcctgttttctgtatttgatgagaaccgaagctggtacctcacagagaatatacaacgctttctccccaatccagctggagtgcagcttgaggatccagagttccaagcctccaacatcatgcacagcatcaatggctatgtttttgatagtttgcagttgtcagtttgtttgcatgaggtggcatactggtacattctaagcattggagcacagactgacttcctttctgtcttcttctctggatataccttcaaacacaaaatggtctatgaagacacactcaccctattcccattctcaggagaaactgtcttcatgtcgatggaaaacccaggtctatggattctggggtgccacaactcagactttcggaacagaggcatgaccgccttactgaaggtttctagttgtgacaagaacactggtgattattacgaggacagttatgaagatatttcagcatacttgctgagtaaaaacaatgccattgaaccaagaagcttctctcaaaacccaccagtcttgaaacgccatcaacgggaaataactcgtactactcttcagtcagatcaagaggaaatcgattatgatgataccatatcagttgaaatgaagaaggaagattttgacatttatgatgaggatgaaaatcagagcccccgcagctttcaaaagaaaacacgacactattttattgctgcagtggagaggctctgggattatgggatgagtagctccccacatgttctaagaaacagggctcagagtggcagtgtccctcagttcaagaaagttgttttccaggaatttactgatggctcctttactcagcccttataccgtggagaactaaatgaacatttgggactcctggggccatatataagagcagaagttgaagataatatcatggtaactttcagaaatcaggcctctcgtccctattccttctattctagccttatttcttatgaggaagatcagaggcaaggagcagaacctagaaaaaactttgtcaagcctaatgaaaccaaaacttacttttggaaagtgcaacatcatatggcacccactaaagatgagtttgactgcaaagcctgggcttatttctctgatgttgacctggaaaaagatgtgcactcaggcctgattggaccccttctggtctgccacactaacacactgaaccctgctcatgggagacaagtgacagtacaggaatttgctctgtttttcaccatctttgatgagaccaaaagctggtacttcactgaaaatatggaaagaaactgcagggctccctgcaatatccagatggaagatcccacttttaaagagaattatcgcttccatgcaatcaatggctacataatggatacactacctggcttagtaatggctcaggatcaaaggattcgatggtatctgctcagcatgggcagcaatgaaaacatccattctattcatttcagtggacatgtgttcactgtacgaaaaaaagaggagtataaaatggcactgtacaatctctatccaggtgtttttgagacagtggaaatgttaccatccaaagctggaatttggcgggtggaatgccttattggcgagcatctacatgctgggatgagcacactttttctggtgtacagcaataagtgtcagactcccctgggaatggcttctggacacattagagattttcagattacagcttcaggacaatatggacagtgggccccaaagctggccagacttcattattccggatcaatcaatgcctggagcaccaaggagcccttttcttggatcaaggtggatctgttggcaccaatgattattcacggcatcaagacccagggtgcccgtcagaagttctccagcctctacatctctcagtttatcatcatgtatagtcttgatgggaagaagtggcagacttatcgaggaaattccactggaaccttaatggtcttctttggcaatgtggattcatctgggataaaacacaatatttttaaccctccaattattgctcgatacatccgtttgcacccaactcattatagcattcgcagcactcttcgcatggagttgatgggctgtgatttaaatagttgcagcatgccattgggaatggagagtaaagcaatatcagatgcacagattactgcttcatcctactttaccaatatgtttgccacctggtctccttcaaaagctcgacttcacctccaagggaggagtaatgcctggagacctcaggtgaataatccaaaagagtggctgcaagtggacttccagaagacaatgaaagtcacaggagtaactactcagggagtaaaatctctgcttaccagcatgtatgtgaaggagttcctcatctccagcagtcaagatggccatcagtggactctcttttttcagaatggcaaagtaaaggtttttcagggaaatcaagactccttcacacctgtggtgaactctctagacccaccgttactgactcgctaccttcgaattcacccccagagttgggtgcaccagattgccctgaggatggaggttctgggctgcgaggcacaggacctctacggcgcgccaacatctaccgagccttccgaaggctctgcccctgggacctcagaatctgcaacccctgaaagcggccctggaacctccgaaagtgccactcccgagagcggcccagggacaagcgagtcagcaacccctgagtctggacccggcagcgagcctgcaacctctggctcagagactcccggctcagaacccgctacctcaggctccgagacacccggctctcctgctgggagtcccacttccaccgaggaaggaacatccactgagcctagtgagggctctgcccctggaaccagcacagagccaagtgagggcagtgcaccaggatccgagccagcaaccagcgggtccgagactcccgggacctctgagtctgccaccccagagagcggacccggcacttcaaccgagccctccgaaggatcagcaccaggtgcctcgagccatcaccatcatcaccatcaccattga

SEQ ID NO: 1483 - protein, 1596 aa, synthetic construct
  REGION 1..1596: note = Description of Artificial Sequence: Synthetic polypeptide
ATRRYYLGAVELSWDYMQSDLGELPVDARFPPRVPKSFPFNTSVVYKKTLFVEFTDHLFNIAKPRPPWMGLLGPTIQAEVYDTVVITLKNMASHPVSLHAVGVSYWKASEGAEYDDQTSQREKEDDKVFPGGSHTYVWQVLKENGPMASDPLCLTYSYLSHVDLVKDLNSGLIGALLVCREGSLAKEKTQTLHKFILLFAVFDEGKSWHSETKNSLMQDRDAASARAWPKMHTVNGYVNRSLPGLIGCHRKSVYWHVIGMGTTPEVHSIFLEGHTFLVRNHRQASLEISPITFLTAQTLLMDLGQFLLFCHISSHQHDGMEAYVKVDSCPEEPQLRMKNNEEAEDYDDDLTDSEMDVVRFDDDNSPSFIQIRSVAKKHPKTWVHYIAAEEEDWDYAPLVLAPDDRSYKSQYLNNGPQRIGRKYKKVRFMAYTDETFKTREAIQHESGILGPLLYGEVGDTLLIIFKNQASRPYNIYPHGITDVRPLYSRRLPKGVKHLKDFPILPGEIFKYKWTVTVEDGPTKSDPRCLTRYYSSFVNMERDLASGLIGPLLICYKESVDQRGNQIMSDKRNVILFSVFDENRSWYLTENIQRFLPNPAGVQLEDPEFQASNIMHSINGYVFDSLQLSVCLHEVAYWYILSIGAQTDFLSVFFSGYTFKHKMVYEDTLTLFPFSGETVFMSMENPGLWILGCHNSDFRNRGMTALLKVSSCDKNTGDYYEDSYEDISAYLLSKNNAIEPRSFSQNPPVLKRHQREITRTTLQSDQEEIDYDDTISVEMKKEDFDIYDEDENQSPRSFQKKTRHYFIAAVERLWDYGMSSSPHVLRNRAQSGSVPQFKKVVFQEFTDGSFTQPLYRGELNEHLGLLGPYIRAEVEDNIMVTFRNQASRPYSFYSSLISYEEDQRQGAEPRKNFVKPNETKTYFWKVQHHMAPTKDEFDCKAWAYFSDVDLEKDVHSGLIGPLLVCHTNTLNPAHGRQVTVQEFALFFTIFDETKSWYFTENMERNCRAPCNIQMEDPTFKENYRFHAINGYIMDTLPGLVMAQDQRIRWYLLSMGSNENIHSIHFSGHVFTVRKKEEYKMALYNLYPGVFETVEMLPSKAGIWRVECLIGEHLHAGMSTLFLVYSNKCQTPLGMASGHIRDFQITASGQYGQWAPKLARLHYSGSINAWSTKEPFSWIKVDLLAPMIIHGIKTQGARQKFSSLYISQFIIMYSLDGKKWQTYRGNSTGTLMVFFGNVDSSGIKHNIFNPPIIARYIRLHPTHYSIRSTLRMELMGCDLNSCSMPLGMESKAISDAQITASSYFTNMFATWSPSKARLHLQGRSNAWRPQVNNPKEWLQVDFQKTMKVTGVTTQGVKSLLTSMYVKEFLISSSQDGHQWTLFFQNGKVKVFQGNQDSFTPVVNSLDPPLLTRYLRIHPQSWVHQIALRMEVLGCEAQDLYGAPPGSSPSASTGTGPGSSPSASTGTGPGTPGSGTASSSPGSSTPSGATGSPGSSPSASTGTGPGASPGTSSTGSPGTPGSGTASSSPGSSTPSGATGSPGTPGSGTASSSPGASPGTSSTGSPGASPGTSSTGSPGTPGSGTASSSASSHHHHHHHH

SEQ ID NO: 1484 - DNA, 4791 bp, synthetic construct
  misc_feature 1..4791: note = Description of Artificial Sequence: Synthetic polynucleotide
  source 1..4791: mol_type = other DNA
gccaccagaagatactacctgggtgcagtggaactgtcatgggactatatgcaaagtgatctcggtgagctgcctgtggacgcaagatttcctcctagagtgccaaaatcttttccattcaacacctcagtcgtgtacaaaaagactctgtttgtagaattcacggatcaccttttcaacatcgctaagccaaggccaccctggatgggtctgctaggtcctaccatccaggctgaggtttatgatacagtggtcattacacttaagaacatggcttcccatcctgtcagtcttcatgctgttggtgtatcctactggaaagcttctgagggagctgaatatgatgatcagaccagtcaaagggagaaagaagatgataaagtcttccctggtggaagccatacatatgtctggcaggtcctgaaagagaatggtccaatggcctctgacccactgtgccttacctactcatatctttctcatgtggacctggtaaaagacttgaattcaggcctcattggagccctactagtatgtagagaagggagtctggccaaggaaaagacacagaccttgcacaaatttatactactttttgctgtatttgatgaagggaaaagttggcactcagaaacaaagaactccttgatgcaggatagggatgctgcatctgctcgggcctggcctaaaatgcacacagtcaatggttatgtaaacaggtctctgccaggtctgattggatgccacaggaaatcagtctattggcatgtgattggaatgggcaccactcctgaagtgcactcaatattcctcgaaggtcacacatttcttgtgaggaaccatcgccaggctagcttggaaatctcgccaataactttccttactgctcaaacactcttgatggaccttggacagtttctactgttttgtcatatctcttcccaccaacatgatggcatggaagcttatgtcaaagtagacagctgtccagaggaaccccaactacgaatgaaaaataatgaagaagcggaagactatgatgatgatcttactgattctgaaatggatgtggtcaggtttgatgatgacaactctccttcctttatccaaattcgctcagttgccaagaagcatcctaaaacttgggtacattacattgctgctgaagaggaggactgggactatgctcccttagtcctcgcccccgatgacagaagttataaaagtcaatatttgaacaatggccctcagcggattggtaggaagtacaaaaaagtccgatttatggcatacacagatgaaacctttaagactcgtgaagctattcagcatgaatcaggaatcttgggacctttactttatggggaagttggagacacactgttgattatatttaagaatcaagcaagcagaccatataacatctaccctcacggaatcactgatgtccgtcctttgtattcaaggagattaccaaaaggtgtaaaacatttgaaggattttccaattctgccaggagaaatattcaaatataaatggacagtgactgtagaagatgggccaactaaatcagatcctcggtgcctgacccgctattactctagtttcgttaatatggagagagatctagcttcaggactcattggccctctcctcatctgctacaaagaatctgtagatcaaagaggaaaccagataatgtcagacaagaggaatgtcatcctgttttctgtatttgatgagaaccgaagctggtacctcacagagaatatacaacgctttctccccaatccagctggagtgcagcttgaggatccagagttccaagcctccaacatcatgcacagcatcaatggctatgtttttgatagtttgcagttgtcagtttgtttgcatgaggtggcatactggtacattctaagcattggagcacagactgacttcctttctgtcttcttctctggatataccttcaaacacaaaatggtctatgaagacacactcaccctattcccattctcaggagaaactgtcttcatgtcgatggaaaacccaggtctatggattctggggtgccacaactcagactttcggaacagaggcatgaccgccttactgaaggtttctagttgtgacaagaacactggtgattattacgaggacagttatgaagatatttcagcatacttgctgagtaaaaacaatgccattgaaccaagaagcttctctcaaaacccaccagtcttgaaacgccatcaacgggaaataactcgtactactcttcagtcagatcaagaggaaatcgattatgatgataccatatcagttgaaatgaagaaggaagattttgacatttatgatgaggatgaaaatcagagcccccgcagctttcaaaagaaaacacgacactattttattgctgcagtggagaggctctgggattatgggatgagtagctccccacatgttctaagaaacagggctcagagtggcagtgtccctcagttcaagaaagttgttttccaggaatttactgatggctcctttactcagcccttataccgtggagaactaaatgaacatttgggactcctggggccatatataagagcagaagttgaagataatatcatggtaactttcagaaatcaggcctctcgtccctattccttctattctagccttatttcttatgaggaagatcagaggcaaggagcagaacctagaaaaaactttgtcaagcctaatgaaaccaaaacttacttttggaaagtgcaacatcatatggcacccactaaagatgagtttgactgcaaagcctgggcttatttctctgatgttgacctggaaaaagatgtgcactcaggcctgattggaccccttctggtctgccacactaacacactgaaccctgctcatgggagacaagtgacagtacaggaatttgctctgtttttcaccatctttgatgagaccaaaagctggtacttcactgaaaatatggaaagaaactgcagggctccctgcaatatccagatggaagatcccacttttaaagagaattatcgcttccatgcaatcaatggctacataatggatacactacctggcttagtaatggctcaggatcaaaggattcgatggtatctgctcagcatgggcagcaatgaaaacatccattctattcatttcagtggacatgtgttcactgtacgaaaaaaagaggagtataaaatggcactgtacaatctctatccaggtgtttttgagacagtggaaatgttaccatccaaagctggaatttggcgggtggaatgccttattggcgagcatctacatgctgggatgagcacactttttctggtgtacagcaataagtgtcagactcccctgggaatggcttctggacacattagagattttcagattacagcttcaggacaatatggacagtgggccccaaagctggccagacttcattattccggatcaatcaatgcctggagcaccaaggagcccttttcttggatcaaggtggatctgttggcaccaatgattattcacggcatcaagacccagggtgcccgtcagaagttctccagcctctacatctctcagtttatcatcatgtatagtcttgatgggaagaagtggcagacttatcgaggaaattccactggaaccttaatggtcttctttggcaatgtggattcatctgggataaaacacaatatttttaaccctccaattattgctcgatacatccgtttgcacccaactcattatagcattcgcagcactcttcgcatggagttgatgggctgtgatttaaatagttgcagcatgccattgggaatggagagtaaagcaatatcagatgcacagattactgcttcatcctactttaccaatatgtttgccacctggtctccttcaaaagctcgacttcacctccaagggaggagtaatgcctggagacctcaggtgaataatccaaaagagtggctgcaagtggacttccagaagacaatgaaagtcacaggagtaactactcagggagtaaaatctctgcttaccagcatgtatgtgaaggagttcctcatctccagcagtcaagatggccatcagtggactctcttttttcagaatggcaaagtaaaggtttttcagggaaatcaagactccttcacacctgtggtgaactctctagacccaccgttactgactcgctaccttcgaattcacccccagagttgggtgcaccagattgccctgaggatggaggttctgggctgcgaggcacaggacctctacggcgcgccacccgggtcgtccccgtcggcgtccaccggaacagggccagggtcatccccgtcagcgtcgactgggacgggacccgggacacccggttcggggactgcatcctcctcgcctggttcgtccaccccgtcaggagccacgggttcgccgggaagcagcccaagcgcatccactggtacagggcctggggcttcaccgggtacttcatccacggggtcaccgggaacgcccggatcggggacggcttcctcatcaccaggatcgtcaacaccctcgggcgcaacgggcagccccggaacccctggttcgggtacggcgtcgtcgagccccggtgcgagcccgggaacaagctcgacaggatcgcctggggcgtcacccggcacgtcgagcacaggcagccccggaacccctggatcgggaaccgcgtcgtcaagcgcctcgagccatcaccatcatcaccatcaccattga

SEQ ID NO: 1485 - protein, 1740 aa, synthetic construct
  REGION 1..1740: note = Description of Artificial Sequence: Synthetic polypeptide
ATRRYYLGAVELSWDYMQSDLGELPVDARFPPRVPKSFPFNTSVVYKKTLFVEFTDHLFNIAKPRPPWMGLLGPTIQAEVYDTVVITLKNMASHPVSLHAVGVSYWKASEGAEYDDQTSQREKEDDKVFPGGSHTYVWQVLKENGPMASDPLCLTYSYLSHVDLVKDLNSGLIGALLVCREGSLAKEKTQTLHKFILLFAVFDEGKSWHSETKNSLMQDRDAASARAWPKMHTVNGYVNRSLPGLIGCHRKSVYWHVIGMGTTPEVHSIFLEGHTFLVRNHRQASLEISPITFLTAQTLLMDLGQFLLFCHISSHQHDGMEAYVKVDSCPEEPQLRMKNNEEAEDYDDDLTDSEMDVVRFDDDNSPSFIQIRSVAKKHPKTWVHYIAAEEEDWDYAPLVLAPDDRSYKSQYLNNGPQRIGRKYKKVRFMAYTDETFKTREAIQHESGILGPLLYGEVGDTLLIIFKNQASRPYNIYPHGITDVRPLYSRRLPKGVKHLKDFPILPGEIFKYKWTVTVEDGPTKSDPRCLTRYYSSFVNMERDLASGLIGPLLICYKESVDQRGNQIMSDKRNVILFSVFDENRSWYLTENIQRFLPNPAGVQLEDPEFQASNIMHSINGYVFDSLQLSVCLHEVAYWYILSIGAQTDFLSVFFSGYTFKHKMVYEDTLTLFPFSGETVFMSMENPGLWILGCHNSDFRNRGMTALLKVSSCDKNTGDYYEDSYEDISAYLLSKNNAIEPRSFSQNPPVLKRHQREITRTTLQSDQEEIDYDDTISVEMKKEDFDIYDEDENQSPRSFQKKTRHYFIAAVERLWDYGMSSSPHVLRNRAQSGSVPQFKKVVFQEFTDGSFTQPLYRGELNEHLGLLGPYIRAEVEDNIMVTFRNQASRPYSFYSSLISYEEDQRQGAEPRKNFVKPNETKTYFWKVQHHMAPTKDEFDCKAWAYFSDVDLEKDVHSGLIGPLLVCHTNTLNPAHGRQVTVQEFALFFTIFDETKSWYFTENMERNCRAPCNIQMEDPTFKENYRFHAINGYIMDTLPGLVMAQDQRIRWYLLSMGSNENIHSIHFSGHVFTVRKKEEYKMALYNLYPGVFETVEMLPSKAGIWRVECLIGEHLHAGMSTLFLVYSNKCQTPLGMASGHIRDFQITASGQYGQWAPKLARLHYSGSINAWSTKEPFSWIKVDLLAPMIIHGIKTQGARQKFSSLYISQFIIMYSLDGKKWQTYRGNSTGTLMVFFGNVDSSGIKHNIFNPPIIARYIRLHPTHYSIRSTLRMELMGCDLNSCSMPLGMESKAISDAQITASSYFTNMFATWSPSKARLHLQGRSNAWRPQVNNPKEWLQVDFQKTMKVTGVTTQGVKSLLTSMYVKEFLISSSQDGHQWTLFFQNGKVKVFQGNQDSFTPVVNSLDPPLLTRYLRIHPQSWVHQIALRMEVLGCEAQDLYGAPGTSESATPESGPGSEPATSGSETPGTSESATPESGPGSEPATSGSETPGTSESATPESGPGTSTEPSEGSAPGSPAGSPTSTEEGTSESATPESGPGSEPATSGSETPGTSESATPESGPGSPAGSPTSTEEGSPAGSPTSTEEGTSTEPSEGSAPGTSESATPESGPGTSESATPESGPGTSESATPESGPGSEPATSGSETPGSEPATSGSETPGSPAGSPTSTEEGTSTEPSEGSAPGTSTEPSEGSAPGSEPATSGSETPGTSESATPESGPGTSTEPSEGSAPASSHHHHHHHH

SEQ ID NO: 1486 - DNA, 5223 bp, synthetic construct
  misc_feature 1..5223: note = Description of Artificial Sequence: Synthetic polynucleotide
  source 1..5223: mol_type = other DNA
gccaccagaagatactacctgggtgcagtggaactgtcatgggactatatgcaaagtgatctcggtgagctgcctgtggacgcaagatttcctcctagagtgccaaaatcttttccattcaacacctcagtcgtgtacaaaaagactctgtttgtagaattcacggatcaccttttcaacatcgctaagccaaggccaccctggatgggtctgctaggtcctaccatccaggctgaggtttatgatacagtggtcattacacttaagaacatggcttcccatcctgtcagtcttcatgctgttggtgtatcctactggaaagcttctgagggagctgaatatgatgatcagaccagtcaaagggagaaagaagatgataaagtcttccctggtggaagccatacatatgtctggcaggtcctgaaagagaatggtccaatggcctctgacccactgtgccttacctactcatatctttctcatgtggacctggtaaaagacttgaattcaggcctcattggagccctactagtatgtagagaagggagtctggccaaggaaaagacacagaccttgcacaaatttatactactttttgctgtatttgatgaagggaaaagttggcactcagaaacaaagaactccttgatgcaggatagggatgctgcatctgctcgggcctggcctaaaatgcacacagtcaatggttatgtaaacaggtctctgccaggtctgattggatgccacaggaaatcagtctattggcatgtgattggaatgggcaccactcctgaagtgcactcaatattcctcgaaggtcacacatttcttgtgaggaaccatcgccaggctagcttggaaatctcgccaataactttccttactgctcaaacactcttgatggaccttggacagtttctactgttttgtcatatctcttcccaccaacatgatggcatggaagcttatgtcaaagtagacagctgtccagaggaaccccaactacgaatgaaaaataatgaagaagcggaagactatgatgatgatcttactgattctgaaatggatgtggtcaggtttgatgatgacaactctccttcctttatccaaattcgctcagttgccaagaagcatcctaaaacttgggtacattacattgctgctgaagaggaggactgggactatgctcccttagtcctcgcccccgatgacagaagttataaaagtcaatatttgaacaatggccctcagcggattggtaggaagtacaaaaaagtccgatttatggcatacacagatgaaacctttaagactcgtgaagctattcagcatgaatcaggaatcttgggacctttactttatggggaagttggagacacactgttgattatatttaagaatcaagcaagcagaccatataacatctaccctcacggaatcactgatgtccgtcctttgtattcaaggagattaccaaaaggtgtaaaacatttgaaggattttccaattctgccaggagaaatattcaaatataaatggacagtgactgtagaagatgggccaactaaatcagatcctcggtgcctgacccgctattactctagtttcgttaatatggagagagatctagcttcaggactcattggccctctcctcatctgctacaaagaatctgtagatcaaagaggaaaccagataatgtcagacaagaggaatgtcatcctgttttctgtatttgatgagaaccgaagctggtacctcacagagaatatacaacgctttctccccaatccagctggagtgcagcttgaggatccagagttccaagcctccaacatcatgcacagcatcaatggctatgtttttgatagtttgcagttgtcagtttgtttgcatgaggtggcatactggtacattctaagcattggagcacagactgacttcctttctgtcttcttctctggatataccttcaaacacaaaatggtctatgaagacacactcaccctattcccattctcaggagaaactgtcttcatgtcgatggaaaacccaggtctatggattctggggtgccacaactcagactttcggaacagaggcatgaccgccttactgaaggtttctagttgtgacaagaacactggtgattattacgaggacagttatgaagatatttcagcatacttgctgagtaaaaacaatgccattgaaccaagaagcttctctcaaaacccaccagtcttgaaacgccatcaacgggaaataactcgtactactcttcagtcagatcaagaggaaatcgattatgatgataccatatcagttgaaatgaagaaggaagattttgacatttatgatgaggatgaaaatcagagcccccgcagctttcaaaagaaaacacgacactattttattgctgcagtggagaggctctgggattatgggatgagtagctccccacatgttctaagaaacagggctcagagtggcagtgtccctcagttcaagaaagttgttttccaggaatttactgatggctcctttactcagcccttataccgtggagaactaaatgaacatttgggactcctggggccatatataagagcagaagttgaagataatatcatggtaactttcagaaatcaggcctctcgtccctattccttctattctagccttatttcttatgaggaagatcagaggcaaggagcagaacctagaaaaaactttgtcaagcctaatgaaaccaaaacttacttttggaaagtgcaacatcatatggcacccactaaagatgagtttgactgcaaagcctgggcttatttctctgatgttgacctggaaaaagatgtgcactcaggcctgattggaccccttctggtctgccacactaacacactgaaccctgctcatgggagacaagtgacagtacaggaatttgctctgtttttcaccatctttgatgagaccaaaagctggtacttcactgaaaatatggaaagaaactgcagggctccctgcaatatccagatggaagatcccacttttaaagagaattatcgcttccatgcaatcaatggctacataatggatacactacctggcttagtaatggctcaggatcaaaggattcgatggtatctgctcagcatgggcagcaatgaaaacatccattctattcatttcagtggacatgtgttcactgtacgaaaaaaagaggagtataaaatggcactgtacaatctctatccaggtgtttttgagacagtggaaatgttaccatccaaagctggaatttggcgggtggaatgccttattggcgagcatctacatgctgggatgagcacactttttctggtgtacagcaataagtgtcagactcccctgggaatggcttctggacacattagagattttcagattacagcttcaggacaatatggacagtgggccccaaagctggccagacttcattattccggatcaatcaatgcctggagcaccaaggagcccttttcttggatcaaggtggatctgttggcaccaatgattattcacggcatcaagacccagggtgcccgtcagaagttctccagcctctacatctctcagtttatcatcatgtatagtcttgatgggaagaagtggcagacttatcgaggaaattccactggaaccttaatggtcttctttggcaatgtggattcatctgggataaaacacaatatttttaaccctccaattattgctcgatacatccgtttgcacccaactcattatagcattcgcagcactcttcgcatggagttgatgggctgtgatttaaatagttgcagcatgccattgggaatggagagtaaagcaatatcagatgcacagattactgcttcatcctactttaccaatatgtttgccacctggtctccttcaaaagctcgacttcacctccaagggaggagtaatgcctggagacctcaggtgaataatccaaaagagtggctgcaagtggacttccagaagacaatgaaagtcacaggagtaactactcagggagtaaaatctctgcttaccagcatgtatgtgaaggagttcctcatctccagcagtcaagatggccatcagtggactctcttttttcagaatggcaaagtaaaggtttttcagggaaatcaagactccttcacacctgtggtgaactctctagacccaccgttactgactcgctaccttcgaattcacccccagagttgggtgcaccagattgccctgaggatggaggttctgggctgcgaggcacaggacctctacggcgcgccaggtacctcagagtctgctacccccgagtcagggccaggatcagagccagccacctccgggtctgagacacccgggacttccgagagtgccacccctgagtccggacccgggtccgagcccgccacttccggctccgaaactcccggcacaagcgagagcgctaccccagagtcaggaccaggaacatctacagagccctctgaaggctccgctccagggtccccagccggcagtcccactagcaccgaggagggaacctctgaaagcgccacacccgaatcagggccagggtctgagcctgctaccagcggcagcgagacaccaggcacctctgagtccgccacaccagagtccggacccggatctcccgctgggagccccacctccactgaggagggatctcctgctggctctccaacatctactgaggaaggtacctcaaccgagccatccgagggatcagctcccggcacctcagagtcggcaaccccggagtctggacccggaacttccgaaagtgccacaccagagtccggtcccgggacttcagaatcagcaacacccgagtccggccctgggtctgaacccgccacaagtggtagtgagacaccaggatcagaacctgctacctcagggtcagagacacccggatctccggcaggctcaccaacctccactgaggagggcaccagcacagaaccaagcgagggctccgcacccggaacaagcactgaacccagtgagggttcagcacccggctctgagccggccacaagtggcagtgagacacccggcacttcagagagtgccacccccgagagtggcccaggcactagtaccgagccctctgaaggcagtgcgccagcctcgagccatcaccatcatcaccatcaccattga

SEQ ID NO: 1487 - protein, 1740 aa, synthetic construct
  REGION 1..1740: note = Description of Artificial Sequence: Synthetic polypeptide
ATRRYYLGAVELSWDYMQSDLGELPVDARFPPRVPKSFPFNTSVVYKKTLFVEFTDHLFNIAKPRPPWMGLLGPTIQAEVYDTVVITLKNMASHPVSLHAVGVSYWKASEGAEYDDQTSQREKEDDKVFPGGSHTYVWQVLKENGPMASDPLCLTYSYLSHVDLVKDLNSGLIGALLVCREGSLAKEKTQTLHKFILLFAVFDEGKSWHSETKNSLMQDRDAASARAWPKMHTVNGYVNRSLPGLIGCHRKSVYWHVIGMGTTPEVHSIFLEGHTFLVRNHRQASLEISPITFLTAQTLLMDLGQFLLFCHISSHQHDGMEAYVKVDSCPEEPQLRMKNNEEAEDYDDDLTDSEMDVVRFDDDNSPSFIQIRSVAKKHPKTWVHYIAAEEEDWDYAPLVLAPDDRSYKSQYLNNGPQRIGRKYKKVRFMAYTDETFKTREAIQHESGILGPLLYGEVGDTLLIIFKNQASRPYNIYPHGITDVRPLYSRRLPKGVKHLKDFPILPGEIFKYKWTVTVEDGPTKSDPRCLTRYYSSFVNMERDLASGLIGPLLICYKESVDQRGNQIMSDKRNVILFSVFDENRSWYLTENIQRFLPNPAGVQLEDPEFQASNIMHSINGYVFDSLQLSVCLHEVAYWYILSIGAQTDFLSVFFSGYTFKHKMVYEDTLTLFPFSGETVFMSMENPGLWILGCHNSDFRNRGMTALLKVSSCDKNTGDYYEDSYEDISAYLLSKNNAIEPRSFSQNPPVLKRHQREITRTTLQSDQEEIDYDDTISVEMKKEDFDIYDEDENQSPRSFQKKTRHYFIAAVERLWDYGMSSSPHVLRNRAQSGSVPQFKKVVFQEFTDGSFTQPLYRGELNEHLGLLGPYIRAEVEDNIMVTFRNQASRPYSFYSSLISYEEDQRQGAEPRKNFVKPNETKTYFWKVQHHMAPTKDEFDCKAWAYFSDVDLEKDVHSGLIGPLLVCHTNTLNPAHGRQVTVQEFALFFTIFDETKSWYFTENMERNCRAPCNIQMEDPTFKENYRFHAINGYIMDTLPGLVMAQDQRIRWYLLSMGSNENIHSIHFSGHVFTVRKKEEYKMALYNLYPGVFETVEMLPSKAGIWRVECLIGEHLHAGMSTLFLVYSNKCQTPLGMASGHIRDFQITASGQYGQWAPKLARLHYSGSINAWSTKEPFSWIKVDLLAPMIIHGIKTQGARQKFSSLYISQFIIMYSLDGKKWQTYRGNSTGTLMVFFGNVDSSGIKHNIFNPPIIARYIRLHPTHYSIRSTLRMELMGCDLNSCSMPLGMESKAISDAQITASSYFTNMFATWSPSKARLHLQGRSNAWRPQVNNPKEWLQVDFQKTMKVTGVTTQGVKSLLTSMYVKEFLISSSQDGHQWTLFFQNGKVKVFQGNQDSFTPVVNSLDPPLLTRYLRIHPQSWVHQIALRMEVLGCEAQDLYGAPPGASPGTSSTGSPGASPGTSSTGSPGTPGSGTASSSPGSSTPSGATGSPGTPGSGTASSSPGSSTPSGATGSPGTPGSGTASSSPGSSTPSGATGSPGSSTPSGATGSPGSSPSASTGTGPGSSPSASTGTGPGASPGTSSTGSPGTPGSGTASSSPGSSTPSGATGSPGSSPSASTGTGPGSSPSASTGTGPGASPGTSSTGSPGASPGTSSTGSPGSSTPSGATGSPGSSPSASTGTGPGASPGTSSTGSPGSSPSASTGTGPGTPGSGTASSSPGSSTPSGATGSASSHHHHHHHH

SEQ ID NO: 1488 - DNA, 5223 bp, synthetic construct
  misc_feature 1..5223: note = Description of Artificial Sequence: Synthetic polynucleotide
  source 1..5223: mol_type = other DNA
gccaccagaagatactacctgggtgcagtggaactgtcatgggactatatgcaaagtgatctcggtgagctgcctgtggacgcaagatttcctcctagagtgccaaaatcttttccattcaacacctcagtcgtgtacaaaaagactctgtttgtagaattcacggatcaccttttcaacatcgctaagccaaggccaccctggatgggtctgctaggtcctaccatccaggctgaggtttatgatacagtggtcattacacttaagaacatggcttcccatcctgtcagtcttcatgctgttggtgtatcctactggaaagcttctgagggagctgaatatgatgatcagaccagtcaaagggagaaagaagatgataaagtcttccctggtggaagccatacatatgtctggcaggtcctgaaagagaatggtccaatggcctctgacccactgtgccttacctactcatatctttctcatgtggacctggtaaaagacttgaattcaggcctcattggagccctactagtatgtagagaagggagtctggccaaggaaaagacacagaccttgcacaaatttatactactttttgctgtatttgatgaagggaaaagttggcactcagaaacaaagaactccttgatgcaggatagggatgctgcatctgctcgggcctggcctaaaatgcacacagtcaatggttatgtaaacaggtctctgccaggtctgattggatgccacaggaaatcagtctattggcatgtgattggaatgggcaccactcctgaagtgcactcaatattcctcgaaggtcacacatttcttgtgaggaaccatcgccaggctagcttggaaatctcgccaataactttccttactgctcaaacactcttgatggaccttggacagtttctactgttttgtcatatctcttcccaccaacatgatggcatggaagcttatgtcaaagtagacagctgtccagaggaaccccaactacgaatgaaaaataatgaagaagcggaagactatgatgatgatcttactgattctgaaatggatgtggtcaggtttgatgatgacaactctccttcctttatccaaattcgctcagttgccaagaagcatcctaaaacttgggtacattacattgctgctgaagaggaggactgggactatgctcccttagtcctcgcccccgatgacagaagttataaaagtcaatatttgaacaatggccctcagcggattggtaggaagtacaaaaaagtccgatttatggcatacacagatgaaacctttaagactcgtgaagctattcagcatgaatcaggaatcttgggacctttactttatggggaagttggagacacactgttgattatatttaagaatcaagcaagcagaccatataacatctaccctcacggaatcactgatgtccgtcctttgtattcaaggagattaccaaaaggtgtaaaacatttgaaggattttccaattctgccaggagaaatattcaaatataaatggacagtgactgtagaagatgggccaactaaatcagatcctcggtgcctgacccgctattactctagtttcgttaatatggagagagatctagcttcaggactcattggccctctcctcatctgctacaaagaatctgtagatcaaagaggaaaccagataatgtcagacaagaggaatgtcatcctgttttctgtatttgatgagaaccgaagctggtacctcacagagaatatacaacgctttctccccaatccagctggagtgcagcttgaggatccagagttccaagcctccaacatcatgcacagcatcaatggctatgtttttgatagtttgcagttgtcagtttgtttgcatgaggtggcatactggtacattctaagcattggagcacagactgacttcctttctgtcttcttctctggatataccttcaaacacaaaatggtctatgaagacacactcaccctattcccattctcaggagaaactgtcttcatgtcgatggaaaacccaggtctatggattctggggtgccacaactcagactttcggaacagaggcatgaccgccttactgaaggtttctagttgtgacaagaacactggtgattattacgaggacagttatgaagatatttcagcatacttgctgagtaaaaacaatgccattgaaccaagaagcttctctcaaaacccaccagtcttgaaacgccatcaacgggaaataactcgtactactcttcagtcagatcaagaggaaatcgattatgatgataccatatcagttgaaatgaagaaggaagattttgacatttatgatgaggatgaaaatcagagcccccgcagctttcaaaagaaaacacgacactattttattgctgcagtggagaggctctgggattatgggatgagtagctccccacatgttctaagaaacagggctcagagtggcagtgtccctcagttcaagaaagttgttttccaggaatttactgatggctcctttactcagcccttataccgtggagaactaaatgaacatttgggactcctggggccatatataagagcagaagttgaagataatatcatggtaactttcagaaatcaggcctctcgtccctattccttctattctagccttatttcttatgaggaagatcagaggcaaggagcagaacctagaaaaaactttgtcaagcctaatgaaaccaaaacttacttttggaaagtgcaacatcatatggcacccactaaagatgagtttgactgcaaagcctgggcttatttctctgatgttgacctggaaaaagatgtgcactcaggcctgattggaccccttctggtctgccacactaacacactgaaccctgctcatgggagacaagtgacagtacaggaatttgctctgtttttcaccatctttgatgagaccaaaagctggtacttcactgaaaatatggaaagaaactgcagggctccctgcaatatccagatggaagatcccacttttaaagagaattatcgcttccatgcaatcaatggctacataatggatacactacctggcttagtaatggctcaggatcaaaggattcgatggtatctgctcagcatgggcagcaatgaaaacatccattctattcatttcagtggacatgtgttcactgtacgaaaaaaagaggagtataaaatggcactgtacaatctctatccaggtgtttttgagacagtggaaatgttaccatccaaagctggaatttggcgggtggaatgccttattggcgagcatctacatgctgggatgagcacactttttctggtgtacagcaataagtgtcagactcccctgggaatggcttctggacacattagagattttcagattacagcttcaggacaatatggacagtgggccccaaagctggccagacttcattattccggatcaatcaatgcctggagcaccaaggagcccttttcttggatcaaggtggatctgttggcaccaatgattattcacggcatcaagacccagggtgcccgtcagaagttctccagcctctacatctctcagtttatcatcatgtatagtcttgatgggaagaagtggcagacttatcgaggaaattccactggaaccttaatggtcttctttggcaatgtggattcatctgggataaaacacaatatttttaaccctccaattattgctcgatacatccgtttgcacccaactcattatagcattcgcagcactcttcgcatggagttgatgggctgtgatttaaatagttgcagcatgccattgggaatggagagtaaagcaatatcagatgcacagattactgcttcatcctactttaccaatatgtttgccacctggtctccttcaaaagctcgacttcacctccaagggaggagtaatgcctggagacctcaggtgaataatccaaaagagtggctgcaagtggacttccagaagacaatgaaagtcacaggagtaactactcagggagtaaaatctctgcttaccagcatgtatgtgaaggagttcctcatctccagcagtcaagatggccatcagtggactctcttttttcagaatggcaaagtaaaggtttttcagggaaatcaagactccttcacacctgtggtgaactctctagacccaccgttactgactcgctaccttcgaattcacccccagagttgggtgcaccagattgccctgaggatggaggttctgggctgcgaggcacaggacctctacggcgcgccaccgggagcgtcacccggtacgtcctcaacggggagccctggggcatcacccggcacgtcctcgacagggtcccccggaacaccgggttcggggactgcgtcgtcgtcacccggttcgtcaacacccagcggtgcgacgggttccccgggaacccccggatcaggaacagcgtcgtcgagccccggaagctcgaccccgtcaggagcgaccgggtcgccaggaacgcctgggtcgggtactgcctcatcgtcgccgggttcatcgacgccctccggagcaacaggttcacccgggtcgtccacccccagcggagcgactggatcaccgggatcgagcccgtcggcatcgacaggaacaggtcccggtagctccccatcggcctccacggggacggggcctggtgcgtcaccggggacaagcagcacgggttcgccgggaacgccagggtcagggaccgcgtcgtcgagcccagggtcgtccaccccaagcggggctactgggtccccgggtagctcgccgagcgcatcaacgggaaccggaccgggcagctccccctcagcgtcgacagggacaggccctggcgcgagcccgggaacatcgtcgacggggtcacccggagcatcgccagggacctcgtcaactggctcgcctggatcgtcaacgccctcgggagccacggggtcgcccggatcatccccgtccgcctcaactggcacaggccctggtgcttcccctggaacgtccagcacaggctcccccggttccagcccttccgcttcgactgggactggacccggaaccccgggatcggggacagcgtcaagctcgcccggaagctccacgccttcgggggcaaccgggtcagcctcgagccatcaccatcatcaccatcaccattga

SEQ ID NO: 1489 - protein, 36 aa, synthetic construct; identical to SEQ ID NO: 279
  REGION 1..36: note = Description of Artificial Sequence: Synthetic polypeptide

SEQ ID NO: 1490 - protein, 36 aa, synthetic construct; identical to SEQ ID NO: 281
  REGION 1..36: note = Description of Artificial Sequence: Synthetic polypeptide

SEQ ID NO: 1491 - protein, 36 aa, synthetic construct; identical to SEQ ID NO: 441
  REGION 1..36: note = Description of Artificial Sequence: Synthetic polypeptide

SEQ ID NO: 1492 - protein, 36 aa, synthetic construct; identical to SEQ ID NO: 443
  REGION 1..36: note = Description of Artificial Sequence: Synthetic polypeptide

SEQ ID NO: 1493 - protein, 42 aa, synthetic construct; identical to SEQ ID NO: 50
  REGION 1..42: note = Description of Artificial Sequence: Synthetic polypeptide

SEQ ID NO: 1494 - protein, 42 aa, synthetic construct; identical to SEQ ID NO: 50
  REGION 1..42: note = Description of Artificial Sequence: Synthetic polypeptide

SEQ ID NO: 1495 - protein, 42 aa, synthetic construct; identical to SEQ ID NO: 53
  REGION 1..42: note = Description of Artificial Sequence: Synthetic polypeptide

SEQ ID NO: 1496 - protein, 42 aa, synthetic construct; identical to SEQ ID NO: 54
  REGION 1..42: note = Description of Artificial Sequence: Synthetic polypeptide

SEQ ID NO: 1497 - protein, 144 aa, synthetic construct; identical to SEQ ID NO: 59
  REGION 1..144: note = Description of Artificial Sequence: Synthetic polypeptide

SEQ ID NO: 1498 - protein, 144 aa, synthetic construct; identical to SEQ ID NO: 71
  REGION 1..144: note = Description of Artificial Sequence: Synthetic polypeptide

SEQ ID NO: 1499 - protein, 288 aa, synthetic construct; identical to SEQ ID NO: 78
  REGION 1..288: note = Description of Artificial Sequence: Synthetic polypeptide

SEQ ID NO: 1500 - protein, 288 aa, synthetic construct; identical to SEQ ID NO: 81
  REGION 1..288: note = Description of Artificial Sequence: Synthetic polypeptide

SEQ ID NO: 1501 - protein, 504 aa, synthetic construct
  REGION 1..504: note = Description of Artificial Sequence: Synthetic polypeptide
GASPGTSSTGSPGSSPSASTGTGPGSSPSASTGTGPGTPGSGTASSSPGSSTPSGATGSPGSNPSASTGTGPGASPGTSSTGSPGTPGSGTASSSPGSSTPSGATGSPGTPGSGTASSSPGASPGTSSTGSPGASPGTSSTGSPGTPGSGTASSSPGSSTPSGATGSPGASPGTSSTGSPGTPGSGTASSSPGSSTPSGATGSPGSNPSASTGTGPGSSPSASTGTGPGSSTPSGATGSPGSSTPSGATGSPGASPGTSSTGSPGASPGTSSTGSPGASPGTSSTGSPGTPGSGTASSSPGASPGTSSTGSPGASPGTSSTGSPGASPGTSSTGSPGSSPSASTGTGPGTPGSGTASSSPGASPGTSSTGSPGASPGTSSTGSPGASPGTSSTGSPGSSTPSGATGSPGSSTPSGATGSPGASPGTSSTGSPGTPGSGTASSSPGSSTPSGATGSPGSSTPSGATGSPGSSTPSGATGSPGSSPSASTGTGPGASPGTSSTGSP

SEQ ID NO: 1502 - protein, 576 aa, synthetic construct; identical to SEQ ID NO: 84
  REGION 1..576: note = Description of Artificial Sequence: Synthetic polypeptide

SEQ ID NO: 1503 - protein, 576 aa, synthetic construct; identical to SEQ ID NO: 85
  REGION 1..576: note = Description of Artificial Sequence: Synthetic polypeptide

SEQ ID NO: 1504 - protein, 576 aa, synthetic construct; identical to SEQ ID NO: 87
  REGION 1..576: note = Description of Artificial Sequence: Synthetic polypeptide

SEQ ID NO: 1505 - protein, 540 aa, synthetic construct; identical to SEQ ID NO: 83
  REGION 1..540: note = Description of Artificial Sequence: Synthetic polypeptide

SEQ ID NO: 1506 - protein, 836 aa, synthetic construct; identical to SEQ ID NO: 89
  REGION 1..836: note = Description of Artificial Sequence: Synthetic polypeptide

SEQ ID NO: 1507 - protein, 864 aa, synthetic construct; identical to SEQ ID NO: 90
  REGION 1..864: note = Description of Artificial Sequence: Synthetic polypeptide

SEQ ID NO: 1508 - protein, 875 aa, synthetic construct; identical to SEQ ID NO: 91
  REGION 1..875: note = Description of Artificial Sequence: Synthetic polypeptide
  VAR_SEQ 430..432: note = Any amino acid
  VAR_SEQ 443..446: note = Any amino acid

SEQ ID NO: 1509 - protein, 864 aa, synthetic construct; identical to SEQ ID NO: 92
  REGION 1..864: note = Description of Artificial Sequence: Synthetic polypeptide

SEQ ID NO: 1510 - protein, 875 aa, synthetic construct; identical to SEQ ID NO: 93
  REGION 1..875: note = Description of Artificial Sequence: Synthetic polypeptide

SEQ ID NO: 1511 - protein, 1318 aa, synthetic construct; identical to SEQ ID NO: 96
  REGION 1..1318: note = Description of Artificial Sequence: Synthetic polypeptide

SEQ ID NO: 1512 - protein, 924 aa, synthetic construct; identical to SEQ ID NO: 95
  REGION 1..924: note = Description of Artificial Sequence: Synthetic polypeptide

SEQ ID NO: 1513 - protein, 913 aa, synthetic construct; identical to SEQ ID NO: 94
  REGION 1..913: note = Description of Artificial Sequence: Synthetic polypeptide

SEQ ID NO: 1514 - protein, 864 aa, synthetic construct; identical to SEQ ID NO: 97
  REGION 1..864: note = Description of Artificial Sequence: Synthetic polypeptide

SEQ ID NO: 1515 - protein, 288 aa, synthetic construct
  REGION 1..288: note = Description of Artificial Sequence: Synthetic polypeptide
GSGGEGGSGGEGGSGGEGGSGGEGGSGGEGGSGGEGGSGGEGGSGGEGGSGGEGGSGGEGGSGGEGGSGGEGGSGGEGGSGGEGGSGGEGGSGGEGGSGGEGGSGGEGGSGGEGGSGGEGGSGGEGGSGGEGGSGGEGGSGGEGGSGGEGGSGGEGGSGGEGGSGGEGGSGGEGGSGGEGGSGGEGGSGGEGGSGGEGGSGGEGGSGGEGGSGGEGGSGGEGGSGGEGGSGGEGGSGGEGGSGGEGGSGGEGGSGGEGGSGGEGGSGGEGGSGGEGGSGGEGGSGGEG

SEQ ID NO: 1516 - protein, 288 aa, synthetic construct
  REGION 1..288: note = Description of Artificial Sequence: Synthetic polypeptide
GEGEGGGEGGEGEGGGEGGEGEGGGEGGEGEGGGEGGEGEGGGEGGEGEGGGEGGEGEGGGEGGEGEGGGEGGEGEGGGEGGEGEGGGEGGEGEGGGEGGEGEGGGEGGEGEGGGEGGEGEGGGEGGEGEGGGEGGEGEGGGEGGEGEGGGEGGEGEGGGEGGEGEGGGEGGEGEGGGEGGEGEGGGEGGEGEGGGEGGEGEGGGEGGEGEGGGEGGEGEGGGEGGEGEGGGEGGEGEGGGEGGEGEGGGEGGEGEGGGEGGEGEGGGEGGEGEGGGEGGEGEGGGEG

SEQ ID NO: 1517 - protein, 288 aa, synthetic construct
  REGION 1..288: note = Description of Artificial Sequence: Synthetic polypeptide
SSESSESSSSESSSESSESSSSESSSESSESSSSESSSESSESSSSESSSESSESSSSESSSESSESSSSESSSESSESSSSESSSESSESSSSESSSESSESSSSESSSESSESSSSESSSESSESSSSESSSESSESSSSESSSESSESSSSESSSESSESSSSESSSESSESSSSESSSESSESSSSESSSESSESSSSESSSESSESSSSESSSESSESSSSESSSESSESSSSESSSESSESSSSESSSESSESSSSESSSESSESSSSESSSESSESSSSES

SEQ ID NO: 1518 - protein, 288 aa, synthetic construct
  REGION 1..288: note = Description of Artificial Sequence: Synthetic polypeptide
GEGSGEGSEGEGSEGSGEGEGSEGSGEGEGGSEGSEGEGGSEGSEGEGGSEGSEGEGSGEGSEGEGGSEGSEGEGSGEGSEGEGSEGGSEGEGGSEGSEGEGSGEGSEGEGGEGGSEGEGSEGSGEGEGSGEGSEGEGSEGSGEGEGSGEGSEGEGSEGSGEGEGSEGSGEGEGGSEGSEGEGSEGSGEGEGGEGSGEGEGSGEGSEGEGGGEGSEGEGSGEGGEGEGSEGGSEGEGGSEGGEGEGSEGSGEGEGSEGGSEGEGSEGGSEGEGSEGSGEGEGSEGSGE

SEQ ID NO: 1519 - protein, 576 aa, synthetic construct
  REGION 1..576: note = Description of Artificial Sequence: Synthetic polypeptide
GGKPGEGGKPEGGGGKPGGKPEGEGEGKPGGKPEGGGKPGGGEGGKPEGGKPEGEGKPGGGEGKPGGKPEGGGGKPEGEGKPGGGGGKPGGKPEGEGKPGGGEGGKPEGKPGEGGEGKPGGKPEGGGEGKPGGGKPGEGGKPGEGKPGGGEGGKPEGGKPEGEGKPGGGEGKPGGKPGEGGKPEGGGEGKPGGKPGEGGEGKPGGGKPEGEGKPGGGKPGGGEGGKPEGEGKPGGKPEGGGEGKPGGKPEGGGKPEGGGEGKPGGGKPGEGGKPGEGEGKPGGKPEGEGKPGGEGGGKPEGKPGGGEGGKPEGGKPGEGGKPEGGKPGEGGEGKPGGGKPGEGGKPEGGGKPEGEGKPGGGGKPGEGGKPEGGKPEGGGEGKPGGGKPEGEGKPGGGEGKPGGKPEGGGGKPGEGGKPEGGKPGGEGGGKPEGEGKPGGKPGEGGGGKPGGKPEGEGKPGEGGEGKPGGKPEGGGEGKPGGKPEGGGEGKPGGGKPGEGGKPEGGGKPGEGGKPGEGGKPEGEGKPGGGEGKPGGKPGEGGKPEGGGEGKPGGKPGGEGGGKPEGGKPGEGGKPEG

SEQ ID NO: 1520 - protein, 558 aa, synthetic construct
  REGION 1..558: note = Description of Artificial Sequence: Synthetic polypeptide
GEGKPGGKPGSGGGKPGEGGKPGSGEGKPGGKPGSGGSGKPGGKPGEGGKPEGGSGGKPGGGGKPGGKPGGEGSGKPGGKPEGGGKPEGGSGGKPGGKPEGGSGGKPGGKPGSGEGGKPGGGKPGGEGKPGSGKPGGEGSGKPGGKPEGGSGGKPGGKPEGGSGGKPGGSGKPGGKPGEGGKPEGGSGGKPGGSGKPGGKPEGGGSGKPGGKPGEGGKPGSGEGGKPGGGKPGGEGKPGSGKPGGEGSGKPGGKPGSGGEGKPGGKPEGGSGGKPGGGKPGGEGKPGSGGKPGEGGKPGSGGGKPGGKPGGEGEGKPGGKPGEGGKPGGEGSGKPGGGGKPGGKPGGEGGKPEGSGKPGGGSGKPGGKPEGGGGKPEGSGKPGGGGKPEGSGKPGGGKPEGGSGGKPGGSGKPGGKPGEGGGKPEGSGKPGGGSGKPGGKPEGGGKPEGGSGGKPGGKPEGGSGGKPGGKPGGEGSGKPGGKPGSGEGGKPGGKPGEGSGGKPGGKPEGGSGGKPGGSGKPGGKPEGGGSGKPGGKPGEGGKPGGEGSGKPGGSGKPG

SEQ ID NO: 1521 - protein, 577 aa, synthetic construct
  REGION 1..577: note = Description of Artificial Sequence: Synthetic polypeptide
GGSGKPGKPGGSGSGKPGSGKPGGGSGKPGSGKPGGGSGKPGSGKPGGGSGKPGSGKPGGGGKPGSGSGKPGGGKPGGSGGKPGGGSGKPGKPGSGGSGKPGSGKPGGGSGGKPGKPGSGGSGGKPGKPGSGGGSGKPGKPGSGGSGGKPGKPGSGGSGGKPGKPGSGGSGKPGSGKPGGGSGKPGSGKPGSGGSGKPGKPGSGGSGKPGSGKPGSGSGKPGSGKPGGGSGKPGSGKPGSGGSGKPGKPGSGGGKPGSGSGKPGGGKPGSGSGKPGGGKPGGSGGKPGGSGGKPGKPGSGGGSGKPGKPGSGGGSGKPGKPGGSGSGKPGSGKPGGGSGKPGSGKPGSGGSGKPGKPGSGGSGGKPGKPGSGGGKPGSGSGKPGGGKPGSGSGKPGGGKPGSGSGKPGGGKPGSGSGKPGGSGKPGSGKPGGGSGGKPGKPGSGGSGKPGSGKPGSGGSGKPGKPGGSGSGKPGSGKPGGGSGKPGSGKPGGGSGKPGSGKPGGGSGKPGSGKPGGGGKPGSGSGKPGGSGGKPGKPGSGGSGGKPGKPGSGGSGKPGSGKPGGGSGGKPGKPGSGG

SEQ ID NO: 1522 - protein, 576 aa, synthetic construct
  REGION 1..576: note = Description of Artificial Sequence: Synthetic polypeptide
GEGSGEGSEGEGSEGSGEGEGSEGSGEGEGGSEGSEGEGSEGSGEGEGGEGSGEGEGSGEGSEGEGGGEGSEGEGSGEGGEGEGSEGGSEGEGGSEGGEGEGSEGSGEGEGSEGGSEGEGSEGGSEGEGSEGSGEGEGSEGSGEGEGSEGSGEGEGSEGSGEGEGSEGGSEGEGGSEGSEGEGSGEGSEGEGGSEGSEGEGGGEGSEGEGSGEGSEGEGGSEGSEGEGGSEGSEGEGGEGSGEGEGSEGSGEGEGSGEGSEGEGSEGSGEGEGSEGSGEGEGGSEGSEGEGSGEGSEGEGSEGSGEGEGSEGSGEGEGGSEGSEGEGGSEGSEGEGGSEGSEGEGGEGSGEGEGSEGSGEGEGSGEGSEGEGSEGSGEGEGSEGSGEGEGGSEGSEGEGSEGSGEGEGGEGSGEGEGSGEGSEGEGGGEGSEGEGSEGSGEGEGSEGSGEGEGSEGGSEGEGGSEGSEGEGSEGGSEGEGSEGGSEGEGSEGSGEGEGSEGSGEGEGSGEGSEGEGGSEGGEGEGSEGGSEGEGSEGGSEGEGGEGSGEGEGGGEGSEGEGSEGSGEGEGSGEGSE

SEQ ID NO: 1523 - protein, 288 aa, synthetic construct; identical to SEQ ID NO: 78
  REGION 1..288: note = Description of Artificial Sequence: Synthetic polypeptide

SEQ ID NO: 1524 - protein, 288 aa, synthetic construct; identical to SEQ ID NO: 80
  REGION 1..288: note = Description of Artificial Sequence: Synthetic polypeptide

SEQ ID NO: 1525 - protein, 576 aa, synthetic construct; identical to SEQ ID NO: 84
  REGION 1..576: note = Description of Artificial Sequence: Synthetic polypeptide

SEQ ID NO: 1526 - protein, 577 aa, synthetic construct
  REGION 1..577: note = Description of Artificial Sequence: Synthetic polypeptide
AGSPAGSPTSTEEGTSESATPESGPGTSTEPSEGSAPGSPAGSPTSTEEGTSTEPSEGSAPGTSTEPSEGSAPGTSESATPESGPGSEPATSGSETPGSEPATSGSETPGSPAGSPTSTEEGTSESATPESGPGTSTEPSEGSAPGTSTEPSEGSAPGSPAGSPTSTEEGTSTEPSEGSAPGTSTEPSEGSAPGTSESATPESGPGTSTEPSEGSAPGTSESATPESGPGSEPATSGSETPGTSTEPSEGSAPGTSTEPSEGSAPGTSESATPESGPGTSESATPESGPGSPAGSPTSTEEGTSESATPESGPGSEPATSGSETPGTSESATPESGPGTSTEPSEGSAPGTSTEPSEGSAPGTSTEPSEGSAPGTSTEPSEGSAPGTSTEPSEGSAPGTSTEPSEGSAPGSPAGSPTSTEEGTSTEPSEGSAPGTSESATPESGPGSEPATSGSETPGTSESATPESGPGSEPATSGSETPGTSESATPESGPGTSTEPSEGSAPGTSESATPESGPGSPAGSPTSTEEGSPAGSPTSTEEGSPAGSPTSTEEGTSESATPESGPGTSTEPSEGSAP

SEQ ID NO: 1527 - protein, 540 aa, synthetic construct; identical to SEQ ID NO: 83
  REGION 1..540: note = Description of Artificial Sequence: Synthetic polypeptide

SEQ ID NO: 1528 - protein, 504 aa, synthetic construct; identical to SEQ ID NO: 1501
  REGION 1..504: note = Description of Artificial Sequence: Synthetic polypeptide

SEQ ID NO: 1529 - protein, 816 aa, synthetic construct
  REGION 1..816: note = Description of Artificial Sequence: Synthetic polypeptide
GSPAGSPTSTEEGTSESATPESGPGTSTEPSEGSAPGSPAGSPTSTEEGTSTEPSEGSAPGTSTEPSEGSAPGTSESATPESGPGSEPATSGSETPGSEPATSGSETPGSPAGSPTSTEEGTSESATPESGPGTSTEPSEGSAPGTSTEPSEGSAPGSPAGSPTSTEEGTSTEPSEGSAPGTSTEPSEGSAPGTSESATPESGPGTSTEPSEGSAPGTSESATPESGPGSEPATSGSETPGTSTEPSEGSAPGTSTEPSEGSAPGTSESATPESGPGTSESATPESGPGSPAGSPTSTEEGTSESATPESGPGSEPATSGSETPGTSESATPESGPGTSTEPSEGSAPGTSTEPSEGSAPGTSTEPSEGSAPGTSTEPSEGSAPGTSTEPSEGSAPGTSTEPSEGSAPGSPAGSPTSTEEGTSTEPSEGSAPGTSESATPESGPGSEPATSGSETPGTSESATPESGPGSEPATSGSETPGTSESATPESGPGTSTEPSEGSAPGTSESATPESGPGSPAGSPTSTEEGSPAGSPTSTEEGSPAGSPTSTEEGTSESATPESGPGTSTEPSEGSAPGTSESATPESGPGSEPATSGSETPGTSESATPESGPGSEPATSGSETPGTSESATPESGPGTSTEPSEGSAPGSPAGSPTSTEEGTSESATPESGPGSEPATSGSETPGTSESATPESGPGSPAGSPTSTEEGSPAGSPTSTEEGTSTEPSEGSAPGTSESATPESGPGTSESATPESGPGTSESATPESGPGSEPATSGSETPGSEPATSGSETPGSPAGSPTSTEEGTSTEPSEGSAP

SEQ ID NO: 1530 - protein, 875 aa, synthetic construct; identical to SEQ ID NO: 91
  REGION 1..875: note = Description of Artificial Sequence: Synthetic polypeptide
  VAR_SEQ 430..432: note = Any amino acid
  VAR_SEQ 443..446: note = Any amino acid

SEQ ID NO: 1531 - protein, 864 aa, synthetic construct; identical to SEQ ID NO: 92
  REGION 1..864: note = Description of Artificial Sequence: Synthetic polypeptide

SEQ ID NO: 1532 - protein, 868 aa, synthetic construct
  REGION 1..868: note = Description of Artificial Sequence: Synthetic polypeptide
GGSPGASPGTSSTGSPGSSPSASTGTGPGSSPSASTGTGPGTPGSGTASSSPGSSTPSGATGSPGSNPSASTGTGPGASPGTSSTGSPGTPGSGTASSSPGSSTPSGATGSPGTPGSGTASSSPGASPGTSSTGSPGASPGTSSTGSPGTPGSGTASSSPGSSTPSGATGSPGASPGTSSTGSPGTPGSGTASSSPGSSTPSGATGSPGSNPSASTGTGPGSSPSASTGTGPGSSTPSGATGSPGSSTPSGATGSPGASPGTSSTGSPGASPGTSSTGSPGASPGTSSTGSPGTPGSGTASSSPGASPGTSSTGSPGASPGTSSTGSPGASPGTSSTGSPGSSPSASTGTGPGTPGSGTASSSPGASPGTSSTGSPGASPGTSSTGSPGASPGTSSTGSPGSSTPSGATGSPGSSTPSGATGSPGASPGTSSTGSPGTPGSGTASSSPGSSTPSGATGSPGSSTPSGATGSPGSSTPSGATGSPGSSPSASTGTGPGASPGTSSTGSPGASPGTSSTGSPGTPGSGTASSSPGASPGTSSTGSPGASPGTSSTGSPGASPGTSSTGSPGASPGTSSTGSPGTPGSGTASSSPGSSTPSGATGSPGTPGSGTASSSPGSSTPSGATGSPGTPGSGTASSSPGSSTPSGATGSPGSSTPSGATGSPGSSPSASTGTGPGSSPSASTGTGPGASPGTSSTGSPGTPGSGTASSSPGSSTPSGATGSPGSSPSASTGTGPGSSPSASTGTGPGASPGTSSTGSPGASPGTSSTGSPGSSTPSGATGSPGSSPSASTGTGPGASPGTSSTGSPGSSPSASTGTGPGTPGSGTASSSPGSSTPSGATGSPGSSTPSGATGSPGASPGTSSTGSP

SEQ ID NO: 1533 - protein, 875 aa, synthetic construct; identical to SEQ ID NO: 93
  REGION 1..875: note = Description of Artificial Sequence: Synthetic polypeptide

SEQ ID NO: 1534 - protein, 913 aa, synthetic construct; identical to SEQ ID NO: 94
  REGION 1..913: note = Description of Artificial Sequence: Synthetic polypeptide

SEQ ID NO: 1535 - protein, 924 aa, synthetic construct; identical to SEQ ID NO: 95
  REGION 1..924: note = Description of Artificial Sequence: Synthetic polypeptide

SEQ ID NO: 1536 - protein, 1318 aa, synthetic construct; identical to SEQ ID NO: 96
  REGION 1..1318: note = Description of Artificial Sequence: Synthetic polypeptide

SEQ ID NO: 1537 - protein, 1874 aa, synthetic construct
  REGION 1..1874: note = Description of Artificial Sequence: Synthetic polypeptide
ATRRYYLGAVELSWDYMQSDLGELPVDARFPPRVPKSFPFNTSVVYKKTLFVEFTVHLFNIAKPRPPWMGLLGPTIQAEVYDTVVITLKNMASHPVSLHAVGVSYWKASEGAEYDDQTSQREKEDDKGGSEPATSGSETPGTSESATPESGPGSEPATSGSETPGSPAGSPTSTEEGTSTEPSEGSAPGSEPATSGSETPGSEPATSGSETPGSEPATSGSETPGTSTEPSEGSAPGTSESATPESGPGSEPATSGSETPGTSTEPSEGSAPGVFPGGSHTYVWQVLKENGPMASDPLCLTYSYLSHVDLVKDLNSGLIGALLVCREGSLAKEKTQTLHKFILLFAVFDEGKSWHSETKNSLMQDRDAASARAWPKMHTVNGYVNRSLPGLIGCHRKSVYWHVIGMGTTPEVHSIFLEGHTFLVRNHRQASLEISPITFLTAQTLLMDLGQFLLFCHISSHQHDGMEAYVKVDSCPEEPQLRMKNNEEAEDYDDDLTDSEMDVVRFDDDNSPSFIQIRSVAKKHPKTWVHYIAAEEEDWDYAPLVLAPDDRSYKSQYLNNGPQRIGRKYKKVRFMAYTDETFKTREAIQHESGILGPLLYGEVGDTLLIIFKNQASRPYNIYPHGITDVRPLYSRRLPKGVKHLKDFPILPGEIFKYKWTVTVEDGPTKSDPRCLTRYYSSFVNMERDLASGLIGPLLICYKESVDQRGNQIMSDKRNVILFSVFDENRSWYLTENIQRFLPNPAGVQLEDPEFQASNIMHSINGYVFDSLQLSVCLHEVAYWYILSIGAQTDFLSVFFSGYTFKHKMVYEDTLTLFPFSGETVFMSMENPGLWILGCHNSDFRNRGMTALLKVSSCDKNTGDYYEDSYEDISAYLLSKNNAIEPRSFSQNGGTSESATPESGPGSEPATSGSETPGTSESATPESGPGSEPATSGSETPGTSESATPESGPGTSTEPSEGSAPGSPAGSPTSTEEGTSESATPESGPGSEPATSGSETPGTSESATPESGPGSPAGSPTSTEEGSPAGSPTSTEEGTSTEPSEGSAPGTSESATPESGPGTSESATPESGPGTSESATPESGPGSEPATSGSETPGSEPATSGSETPGSPAGSPTSTEEGTSTEPSEGSAPGTSTEPSEGSAPGSEPATSGSETPGTSESATPESGPGTSTEPSEGSAPGPPVLKRHQREITRTTLQSDQEEIDYDDTISVEMKKEDFDIYDEDENQSPRSFQKKTRHYFIAAVERLWDYGMSSSPHVLRNRAQSGSVPQFKKVVFQEFTDGSFTQPLYRGELNEHLGLLGPYIRAEVEDNIMVTFRNQASRPYSFYSSLISYEEDQRQGAEPRKNFVKPNETKTYFWKVQHHMAPTKDEFDCKAWAYFSDVDLEKDVHSGLIGPLLVCHTNTLNPAHGRQVTVQEFALFFTIFDETKSWYFTENMERNCRAPCNIQMEDPTFKENYRFHAINGYIMDTLPGLVMAQDQRIRWYLLSMGSNENIHSIHFSGHVFTVRKKEEYKMALYNLYPGVFETVEMLPSKAGIWRVECLIGEHLHAGMSTLFLVYSNKCQTPLGMASGHIRDFQITASGQYGQWAPKLARLHYSGSINAWSTKEPFSWIKVDLLAPMIIHGIKTQGARQKFSSLYISQFIIMYSLDGKKWQTYRGNSTGTLMVFFGNVDSSGIKHNIFNPPIIARYIRLHPTHYSIRSTLRMELMGCDLNSCSMPLGMESKAISDAQITASSYFTNMFATWSPSKARLHLQGRSNAWRPQVNNPKEWLQVDFQKTMKVTGVTTQGVKSLLTSMYVKEFLISSSQDGHQWTLFFQNGKVKVFQGNQDSFTPVVNSLDPPLLTRYLRIHPQSWVHQIALRMEVLGCEAQDLY

SEQ ID NO: 1538 - protein, 2162 aa, synthetic construct
  REGION 1..2162: note = Description of Artificial Sequence: Synthetic polypeptide
ATRRYYLGAVELSWDYMQSDLGELPVDARFPPRVPKSFPFNTSVVYKKTLFVEFTVHLFNIAKPRPPWMGLLGPTIQAEVYDTVVITLKNMASHPVSLHAVGVSYWKASEGAEYDDQTSQREKEDDKVFPGGSHTYVWQVLKENGPMASDPLCLTYSYLSHVDLVKDLNSGLIGALLVCREGSLAKEKTQTLHKFILLFAVFDEGKSWHSETKNSLMQDRDAASARAWPKMHTVNGYVNRSLPGLIGCHRKSVYWHVIGMGTTPEVHSIFLEGHTFLVRNHRQASLEISPITFLTAQTLLMDLGQFLLFCHISSHQHDGMEAYVKVDSCPEEPQLRMKNNEEAEDYDDDLTDSEMDVVRFDDDNSPSFIQIRSVAGGSPAGSPTSTEEGTSESATPESGPGTSTEPSEGSAPGSPAGSPTSTEEGTSTEPSEGSAPGTSTEPSEGSAPGTSESATPESGPGSEPATSGSETPGSEPATSGSETPGSPAGSPTSTEEGTSESATPESGPGTSTEPSEGSAPGTSTEPSEGSAPGSPAGSPTSTEEGTSTEPSEGSAPGTSTEPSEGSAPGTSESATPESGPGTSTEPSEGSAPGTSESATPESGPGSEPATSGSETPGTSTEPSEGSAPGTSTEPSEGSAPGTSESATPESGPGTSESATPESGPGSPAGSPTSTEEGTSESATPESGPGSEPATSGSETPGTSESATPESGPGTSTEPSEGSAPGTSTEPSEGSAPGTSTEPSEGSAPGTSTEPSEGSAPGTSTEPSEGSAPGTSTEPSEGSAPGSPAGSPTSTEEGTSTEPSEGSAPGTSESATPESGPGSEPATSGSETPGTSESATPESGPGSEPATSGSETPGTSESATPESGPGTSTEPSEGSAPGTSESATPESGPGSPAGSPTSTEEGSPAGSPTSTEEGSPAGSPTSTEEGTSESATPESGPGTSTEPSEGSAPGKKHPKTWVHYIAAEEEDWDYAPLVLAPDDRSYKSQYLNNGPQRIGRKYKKVRFMAYTDETFKTREAIQHESGILGPLLYGEVGDTLLIIFKNQASRPYNIYPHGITDVRPLYSRRLPKGVKHLKDFPILPGEIFKYKWTVTVEDGPTKSDPRCLTRYYSSFVNMERDLASGLIGPLLICYKESVDQRGNQIMSDKRNVILFSVFDENRSWYLTENIQRFLPNPAGVQLEDPEFQASNIMHSINGYVFDSLQLSVCLHEVAYWYILSIGAQTDFLSVFFSGYTFKHKMVYEDTLTLFPFSGETVFMSMENPGLWILGCHNSDFRNRGMTALLKVSSCDKNTGDYYEDSYEDISAYLLSKNNAIEPRSFSQNGGSEPATSGSETPGTSESATPESGPGSEPATSGSETPGSPAGSPTSTEEGTSTEPSEGSAPGSEPATSGSETPGSEPATSGSETPGSEPATSGSETPGTSTEPSEGSAPGTSESATPESGPGSEPATSGSETPGTSTEPSEGSAPGPPVLKRHQREITRTTLQSDQEEIDYDDTISVEMKKEDFDIYDEDENQSPRSFQKKTRHYFIAAVERLWDYGMSSSPHVLRNRAQSGSVPQFKKVVFQEFTDGSFTQPLYRGELNEHLGLLGPYIRAEVEDNIMVTFRNQASRPYSFYSSLISYEEDQRQGAEPRKNFVKPNETKTYFWKVQHHMAPTKDEFDCKAWAYFSDVDLEKDVHSGLIGPLLVCHTNTLNPAHGRQVTVQEFALFFTIFDETKSWYFTENMERNCRAPCNIQMEDPTFKENYRFHAINGYIMDTLPGLVMAQDQRIRWYLLSMGSNENIHSIHFSGHVFTVRKKEEYKMALYNLYPGVFETVEMLPSKAGIWRVECLIGEHLHAGMSTLFLVYSNKCQTPLGMASGHIRDFQITASGQYGQWAPKLARLHYSGSINAWSTKEPFSWIKVDLLAPMIIHGIKTQGARQKFSSLYISQFIIMYSLDGKKWQTYRGNSTGTLMVFFGNVDSSGIKHNIFNPPIIARYIRLHPTHYSIRSTLRMELMGCDLNSCSMPLGMESKAISDAQITASSYFTNMFATWSPSKARLHLQGRSNAWRPQVNNPKEWLQVDFQKTMKVTGVTTQGVKSLLTSMYVKEFLISSSQDGHQWTLFFQNGKVKVFQGNQDSFTPVVNSLDPPLLTRYLRIHPQSWVHQIALRMEVLGCEAQDLY

SEQ ID NO: 1539 - protein, 2449 aa, synthetic construct
  REGION 1..2449: note = Description of Artificial Sequence: Synthetic polypeptide
ATRRYYLGAVELSWDYMQSDLGELPVDARFPPRVPKSFPFNTSVVYKKTLFVEFTVHLFNIAKPRPPWMGLLGPTIQAEVYDTVVITLKNMASHPVSLHAVGVSYWKASEGAEYDDQTSQREKEDDKVFPGGSHTYVWQVLKENGPMASDPLCLTYSYLSHVDLVKDLNSGLIGALLVCREGSLAKEKTQTLHKFILLFAVFDEGKSWHSETKNSLMQDRDAASARAWPKMHTVNGYVNRSLPGLIGCHRKSVYWHVIGMGTTPEVHSIFLEGHTFLVRNHRQASLEISPITFLTAQTLLMDLGQFLLFCHISSHQHDGMEAYVKVDSCPEEPQLRMKNNEEAEDYDDDLTDSEMDVVRFDDDNSPSFIQIRSVAKKHPKTWVHYIAAEEEDWDYAPLVLAPDDRSYKSQYLNNGPQRIGRKYKKVRFMAYTDETFKTREAIQHESGILGPLLYGEVGDTLLIIFKNQASRPYNIYPHGITDVRPLYSRRLPKGVKHLKDFPILPGEIFKYKWTVTVEDGPTKSDPRCLTRYYSSFVNMERDLASGLIGPLLICYKESVDQRGNQIMSDKRNVILFSVFDENRSWYLTENIQRFLPNPAGVQLEDPEFQASNIMHSINGYVFDSLQLSVCLHEVAYWYILSIGAQTDFLSVFFSGYTFKHKMVYEDTLTLFPFSGETVFMSMENPGLWILGCHNSDFRNRGMTALLKVSSCDKNTGDYYEDSYEDISAYLLSKNNAIEPRSFSQNPPVLKRHQREITRTTLQSDQEEIDYDDTISVEMKKEDFDIYDEDENQSPRSFQKKTRHYFIAAVERLWDYGMSSSPHVLRNRAQSGSVPQFKKVVFQEFTDGSFTQPLYRGELNEHLGLLGPYIRAEVEDNIMVTFRNQASRPYSFYSSLISYGGTSTPESGSASPGTSPSGESSTAPGTSPSGESSTAPGSTSSTAESPGPGSTSESPSGTAPGSTSSTAESPGPGTSPSGESSTAPGTSTPESGSASPGSTSSTAESPGPGTSPSGESSTAPGTSPSGESSTAPGTSPSGESSTAPGEEDQRQGAEPRKNFVKPNETKTYFWKVQHHMAPTKDEFDCKAWAYFSDVDLEKDVHSGLIGPLLVCHTNTLNPAHGRQVTVQEFALFFTIFDETKSWYFTENMERNCRAPCNIQMEDPTFKENYRFHAINGYIMDTLPGLVMAQDQRIRWYLLSMGSNENIHSIHFSGHVFTVRKKEEYKMALYNLYPGVFETVEMLPSKAGIWRVECLIGEHLHAGMSTLFLVYSNKCQTPLGMASGHIRDFQITASGQYGQWAPKLARLHYSGSINAWSTKEPFSWIKVDLLAPMIIHGIKTQGARQKFSSLYISQFIIMYSLDGKKWQTYRGNSTGTLMVFFGNVDSSGIKHNIFNPPIIARYIRLHPTHYSIRSTLRMELMGCDLNSCSMPLGMESKAISDAQITASSYFTNMFATWSPSKARLHLQGRSNAWRPQVNNPKEWLQVDFQKTMKVTGVTTQGVKSLLTSMYVKEFLISSSQDGHQWTLFFQNGKVKVFQGNQDSFTPVVNSLDPPLLTRYLRIHPQSWVHQIALRMEVLGCEAQDLYGGSPAGSPTSTEEGTSESATPESGPGTSTEPSEGSAPGSPAGSPTSTEEGTSTEPSEGSAPGTSTEPSEGSAPGTSESATPESGPGSEPATSGSETPGSEPATSGSETPGSPAGSPTSTEEGTSESATPESGPGTSTEPSEGSAPGTSTEPSEGSAPGSPAGSPTSTEEGTSTEPSEGSAPGTSTEPSEGSAPGTSESATPESGPGTSTEPSEGSAPGTSESATPESGPGSEPATSGSETPGTSTEPSEGSAPGTSTEPSEGSAPGTSESATPESGPGTSESATPESGPGSPAGSPTSTEEGTSESATPESGPGSEPATSGSETPGTSESATPESGPGTSTEPSEGSAPGTSTEPSEGSAPGTSTEPSEGSAPGTSTEPSEGSAPGTSTEPSEGSAPGTSTEPSEGSAPGSPAGSPTSTEEGTSTEPSEGSAPGTSESATPESGPGSEPATSGSETPGTSESATPESGPGSEPATSGSETPGTSESATPESGPGTSTEPSEGSAPGTSESATPESGPGSPAGSPTSTEEGSPAGSPTSTEEGSPAGSPTSTEEGTSESATPESGPGTSTEPSEGSAPGTSESATPESGPGSEPATSGSETPGTSESATPESGPGSEPATSGSETPGTSESATPESGPGTSTEPSEGSAPGSPAGSPTSTEEGTSESATPESGPGSEPATSGSETPGTSESATPESGPGSPAGSPTSTEEGSPAGSPTSTEEGTSTEPSEGSAPGTSESATPESGPGTSESATPESGPGTSESATPESGPGSEPATSGSETPGSEPATSGSETPGSPAGSPTSTEEGTSTEPSEGSAPGTSTEPSEGSAPGSEPATSGSETPGTSESATPESGPGTSTEPSEGSAP

SEQ ID NO: 1540 - protein, 2450 aa, synthetic construct [sequence omitted]

SEQ ID NO: 1541 - protein, 1715 aa, synthetic construct
  REGION 1..1715: note = Description of Artificial Sequence: Synthetic polypeptide
ATRRYYLGAVELSWDYMQSDLGELPVDARFPPRVPKSFPFNTSVVYKKTLFVEFTVHLFNIAKPRPPWMGLLGPTIQAEVYDTVVITLKNMASHPVSLHAVGVSYWKASEGAEYDDQTSQREKEDDKVFPGGSHTYVWQVLKENGPMASDPLCLTYSYLSHVDLVKDLNSGLIGALLVCREGSLAKEKTQTLHKFILLFAVFDEGKSWHSETKNSLMQDRDAASARAWPKMHTVNGYVNRSLPGLIGCHRKSVYWHVIGMGTTPEVHSIFLEGHTFLVRNHRQASLEISPITFLTAQTLLMDLGQFLLFCHISSHQHDGMEAYVKVDSCPEEPQLRMKNNEEAEDYDDDLTDSEMDVVRFDDDNSPSFIQIRSVAKKHPKTWVHYIAAEEEDWDYAPLVLAPDDRSYKSQYLNNGPQRIGRKYKKVRFMAYTDETFKTREAIQHESGILGPLLYGEVGDTLLIIFKNQASRPYNIYPHGITDVRPLYSRRLPKGVKHLKDFPILPGEIFKYKWTVTVEDGPTKSDPRCLTRYYSSFVNMERDLASGLIGPLLICYKESVDQRGNQIMSDKRNVILFSVFDENRSWYLTENIQRFLPNPAGVQLEDPEFQASNIMHSINGYVFDSLQLSVCLHEVAYWYILSIGAQTDFLSVFFSGYTFKHKMVYEDTLTLFPFSGETVFMSMENPGLWILGCHNSDFRNRGMTALLKVSSCDKNTGDYYEDSYEDISAYLLSKNNAIEPRSFSQNPPVLKRHQREITRTTLQSDQEEIDYDDTISVEMKKEDFDIYDEDENQSPRSFQKKTRHYFIAAVERLWDYGMSSSPHVLRNRAQSGSVPQFKKVVFQEFTDGSFTQPLYRGELNEHLGLLGPYIRAEVEDNIMVTFRNQASRPYSFYSSLISYEEDQRQGGGSEPATSGSETPGTSESATPESGPGSEPATSGSETPGSPAGSPTSTEEGTSTEPSEGSAPGSEPATSGSETPGSEPATSGSETPGSEPATSGSETPGTSTEPSEGSAPGTSESATPESGPGSEPATSGSETPGTSTEPSEGSAPGAEPRKNFVKPNETKTYFWKVQHHMAPTKDEFDCKAWAYFSDVDLEKDVHSGLIGPLLVCHTNTLNPAHGRQVTVQEFALFFTIFDETKSWYFTENMERNCRAPCNIQMEDPTFKENYRFHAINGYIMDTLPGLVMAQDQRIRWYLLSMGSNENIHSIHFSGHVFTVRKKEEYKMALYNLYPGVFETVEMLPSKAGIWRVECLIGEHLHAGMSTLFLVYSNKCQTPLGMASGHIRDFQITASGQYGQWAPKLARLHYSGSINAWSTKEPFSWIKVDLLAPMIIHGIKTQGARQKFGSEPATSGSETPGTSESATPESGPGTSTEPSEGSAPGSPAGSPGSSLYISQFIIMYSLDGKKWQTYRGNSTGTLMVFFGNVDSSGIKHNIFNPPIIARYIRLHPTHYSIRSTLRMELMGCDLNSCSMPLGMESKAISDAQITASSYFTNMFATWSPSKARLHLQGRSNAWRPQVGPAGSPTSTEEGTSTEPSEGSAPGTSESATPESGPGSEPATSGGNNPKEWLQVDFQKTMKVTGVTTQGVKSLLTSMYVKEFLISSSQDGHQWTLFFQNGGTEPSEGSAPGSPAGSPTSTEEGTSESATPESGPGSEPATSGSKVKVFQGNQDSFTPVVNSLDPPLLTRYLRIHPQSWVHQIALRMEVLGCEAQDLY

SEQ ID NO: 1542 - protein, 3317 aa, synthetic construct
  REGION 1..3317: note = Description of Artificial Sequence: Synthetic polypeptide
ATRRYYLGAVELSWDYMQSDLGELPVDARGPGSSPSASTGTGPGSSPSASTGTGPGTPGSGTASSSPGSSTPSGATGSPGSSPSASTGTGPGASPGTSSTGSPGTPGSGTASSSPGSSTPSGATGSPGTPGSGTASSSPGASPGTSSTGSPGASPGTSSTGSPGTPGSGTASSSGFPPRVPKSFPFNTSVVYKKTLFVEFTVHLFNIAKPRPPWMGLLGPTIQAEVYDTVVITLKNMASHPVSLHAVGVSYWKASEGAEYDDQTSQREKEDDKVFPGGSHTYVWQVLKENGPMASDPLCLTYSYLSHVDLVKDLNSGLIGALLVCREGSLAKEKTQTLHKFILLFAVFDEGKSWHSETKNSLMQDRDAASARAWPKMHTVNGYVNRSLPGGPGASPGTSSTGSPGASPGTSSTGSPGTPGSGTASSSPGSSTPSGATGSPGTPGSGTASSSPGSSTPSGATGSPGTPGSGTASSSPGSSTPSGATGSPGSSTPSGATGSPGSSPSASTGTGPGSSPSASTGTGPGASPGTSSTGSPGTPGSGTASSSPGSSTPSGATGSPGSSPSASTGTGPGSSPSASTGTGPGASPGTSSTGSPGASPGTSSTGSPGSSTPSGATGSPGSSPSASTGTGPGASPGTSSTGSPGSSPSASTGTGPGTPGSGTASSSPGSSTPSGATGSGLIGCHRKSVYWHVIGMGTTPEVHSIFLEGHTFLVRNHRQASLEISPITFLTAQTLLMDLGQFLLFCHISSHQHDGMEAYVKVDSCPEEPQLRMKNNEEAEDYDDDLTDSEMDVVRFDDDNSPSFIQIRSVAKKHPKTWVHYIAAEEEDWDYAPLVLAPDDRSYKSQYLNNGPQRIGRKYKKVRFMAYTDETFKTREAIQHESGILGPLLYGEVGDTLLIIFKNQASRPYNIYPHGITDVRPLYSRRLPKGVKHLKDFPILPGEIFKYKWTVTVEDGPTKSDPRCLTRYYSSFVNMERDLASGLIGPLLICYKESVDQRGNQIMSDKRNVILFSVFDENRSWYLTENIQRFLPNPAGVQLEDPEFQASNIMHSINGYVFDSLQLSVCLHEVAYWYILSIGAQTDFLSVFFSGYTFKHKMVYEDTLTLFPFSGETVFMSMENPGLWILGCHNSDFRNRGMTALLKVSSCDKNTGDYYEDSYEDISAYLLSKNNAIEPRSFSQNPPVLKRHQREITRTTLQSDQEEIDYDDTISVEMKKEDFDIYDEDENQSPRSFQKKTRHYFIAAVERLWDYGMSSSPHVLRNRAQSGSVPQFKKVVFQEFTDGSFTQPLYRGELNEHLGLLGPYIRAEVEDNIMVTFRNQASRPYSFYSSLISYEEDQRQGAEPRKNFVKPNETKTYFWKVQHHMAPTKDEFDCKAWAYFSDVDLEKDVHSGLIGPLLVCHTNTLNPAHGRQVTVQEFALFFTIFDETKSWYFTENMERNCRAPCNIQMEDPTFKENYRFHAGINGYIMDTLPGLVMAQDQRIRWYLLSMGSNENIHSIHFSGHVFTVRKKEEYKMALYNLYPGVFETVEMLPSKAGIWRVECLIGEHLHAGMSTLFLVYSNKCQTPLGMASGHIRDFQITASGQYGQWAPKLARLHYSGSINAWSTKEPFSWIKVDLLAPMIIHGIKTQGARGSPAGSPTSTEEGTSESATPESGPGTSTEPSEGSAPGSPAGSPTSTEEGTSTEPSEGSAPGTSTEPSEGSAPGTSESATPESGPGSEPATSGSETPGSEPATSGSETPGSPAGSPTSTEEGTSESATPESGPGTSTEPSEGSAPGTSTEPSEGSAPGSPAGSPTSTEEGTSTEPSEGSAPGTSTEPSEGSAPGTSESATPESGPGTSTEPSEGSAPGTSESATPESGPGSEPATSGSETPGTSTEPSEGSAPGTSTEPSEGSAPGTSESATPESGPGTSESATPESGPGSPAGSPTSTEEGTSESATPESGPGSEPATSGSETPGTSESATPESGPGTSTEPSEGSAPGTSTEPSEGSAPGTSTEPSEGSAPGTSTEPSEGSAPGTSTEPSEGSAPGTSTEPSEGSAPGSPAGSPTSTEEGTSTEPSEGSAPGTSESATPESGPGSEPATSGSETPGTSESATPESGPGSEPATSGSETPGTSESATPESGPGTSTEPSEGSAPGTSESATPESGPGSPAGSPTSTEEGSPAGSPTSTEEGSPAGSPTSTEEGTSESATPESGPGTSTEPSEGSAPGQKFSSLYISQFIIMYSLDGKKWQTYRGNSTGTLMVFFGNVDSSGIKHNIFNPPIIARYIRLHPTHYSIRSTLRMELMGCDLNSCSMPLGMESKAISDAQITASSYFTNMFATWSPSKARLHLQGRSNAWRPQVNNPKEWLQVDFQKTMKVTGVTTQGVKSLLTSMYVKEFLISSSQDGHQWTLFFQNGKVKVFQGNQDSFTPVVNSLDPPLLTRYLRIHPQSWVHQIALRMEVLGCEAQDLYGGSPAGSPTSTEEGTSESATPESGPGTSTEPSEGSAPGSPAGSPTSTEEGTSTEPSEGSAPGTSTEPSEGSAPGTSESATPESGPGSEPATSGSETPGSEPATSGSETPGSPAGSPTSTEEGTSESATPESGPGTSTEPSEGSAPGTSTEPSEGSAPGSPAGSPTSTEEGTSTEPSEGSAPGTSTEPSEGSAPGTSESATPESGPGTSTEPSEGSAPGTSESATPESGPGSEPATSGSETPGTSTEPSEGSAPGTSTEPSEGSAPGTSESATPESGPGTSESATPESGPGSPAGSPTSTEEGTSESATPESGPGSEPATSGSETPGTSESATPESGPGTSTEPSEGSAPGTSTEPSEGSAPGTSTEPSEGSAPGTSTEPSEGSAPGTSTEPSEGSAPGTSTEPSEGSAPGSPAGSPTSTEEGTSTEPSEGSAPGTSESATPESGPGSEPATSGSETPGTSESATPESGPGSEPATSGSETPGTSESATPESGPGTSTEPSEGSAPGTSESATPESGPGSPAGSPTSTEEGSPAGSPTSTEEGSPAGSPTSTEEGTSESATPESGPGTSTEPSEGSAPGTSESATPESGPGSEPATSGSETPGTSESATPESGPGSEPATSGSETPGTSESATPESGPGTSTEPSEGSAPGSPAGSPTSTEEGTSESATPESGPGSEPATSGSETPGTSESATPESGPGSPAGSPTSTEEGSPAGSPTSTEEGTSTEPSEGSAPGTSESATPESGPGTSESATPESGPGTSESATPESGPGSEPATSGSETPGSEPATSGSETPGSPAGSPTSTEEGTSTEPSEGSAPGTSTEPSEGSAPGSEPATSGSETPGTSESATPESGPGTSTEPSEGSAP

SEQ ID NO: 1543 - protein, 3347 aa, synthetic construct [sequence omitted]

SEQ ID NO: 1544 - protein, 1614 aa, synthetic construct
  REGION 1..1614: note = Description of Artificial Sequence: Synthetic polypeptide
ATRRYYLGAVELSWDYMQSDLGELPVDAGGAPSPSASTGTGPGTPGSGTASSSPGSSTPSGATGSPGPSGPGRFPPRVPKSFPFNTSVVYKKTLFVEFTVHLFNIAKPRPPWMGLLGPTIQAEVYDTVVITLKNMASHPVSLHAVGVSYWKASEGAEYDDQTSQREKEGGPGTPGSGTASSSPGSSTPSGATGSPGSSPSASTGTGPGASPGDDKVFPGGSHTYVWQVLKENGPMASDPLCLTYSYLSHVDLVKDLNSGLIGALLVCREGSLAKEKTQTLHKFILLFAVFDEGGSPSASTGTGPGASPGTSSTGSPGTPGSGTASSSPGSSTPSGAGKSWHSETKNSLMQDRDAASARAWPKMHTVNGYVNSSLPGLIGCHRKSVYWHVIGMGTTPEVHSIFLEGHTFLVRNHRQASLEISPITFLTAQTLLMDLGQFLLFCHISSHQHDGMEAYVKVDSCPEEPGSASTGTGPGASPGTSSTGSPGTPGSGTASSSPGSSTPSGATGGQLRMKNNEEAEDYDDDLTDSEMDVVRFDDDNSPSFIQIRSVAKKHPKTWVHYIAAEEEDWDYAPLVLAPDDRSYKSQYLNNGPQRIGRKYKKVRFMAYTDETFKTREAIQHESGILGPLLYGEVGDTLLIIFKNQASRPYNIYPHGITDVRPLYSRRLPKGVKHLKDFPILPGEIFKYKWTVTVEDGPTKSDPRCLTRYYSSFVNMERDLASGLIGPLLICYKESVDQRGNQIMSDKRNVILFSVFDENRSWYLTENIQRFLPNPAGVQLEDPEFQASNIMHSINGYVFDSLQLSVCLHEVAYWYILSIGAQTDFLSVFFSGYTFKHKMVYEDTLTLFPFSGETVFMSMENPGLWILGCHNSDFRNRGMTALLKVSSCDKNTGDYYEDSYEDISAYLLSKNNAIEPRSFSQNPPVLKRHQREITRTTLQSDQEEIDYDDTISVEMKKEDFDIYDEDENQSPRSFQKKTRHYFIAAVERLWDYGMSSSPHVLRNRAQSGSVPQFKKVVFQEFTDGSFTQPLYRGELNEHLGLLGPYIRAEVEDNIMVTFRNQASRPYSFYSSLISYEEDQRQGAEPRKNFVKPNETKTYFWKVQHHMAPTKDEFDCKAWAYFSDVDLEKDVHSGLIGPLLVCHTNTLNPAHGRQVTVQEFALFFTIFDETKSWYFTENMERNCRAPCNIQMEDPTFKENYRFHAINGYIMDTLPGLVMAQDQRIRWYLLSMGSNENIHSIHFSGHVFTVRKKEEYKMALYNLYPGVFETVEMLPSKAGIWRVECLIGEHLHAGMSTLFLVYSNKCQTPLGMASGHIRDFQITASGQYGQWAPKLARLHYSGSINAWSTKEPFSWIKVDLLAPMIIHGIKTQGARQKFSSLYISQFIIMYSLDGKKWQTYRGNSTGTLMVFFGNVDSSGIKHNIFNPPIIARYIRLHPTHYSIRSTLRMELMGCDLNSCSMPLGMESKAISDAQITASSYFTNMFATWTPSKARLHLQGRSNAWRPQVNNPKEWLQVDFQKTMKVTGVTTQGVKSLLTSMYVKEFLISSSQDGHQWTLFFQNGKVKVFQGNQDSFTPVVNSLDPPLLTRYLRIHPQSWVHQIALRMEVLGCEAQDLY

SEQ ID NO: 1545 - protein, 2914 aa, synthetic construct [sequence omitted]

SEQ ID NO: 1546 - protein, 2304 aa, synthetic construct
  REGION 1..2304: note = Description of Artificial Sequence: Synthetic polypeptide
ATRRYYLGAVELSWDYMQSDLGELPVDARFPPRVPKSFPFNTSVVYKKTLFVEFTVHLFNIAKPRPPWMGLLGPTIQAEVYDTVVITLKNMASHPVSLHAVGVSYWKASEGAEYDDQTSQREKEDDKVFPGGSHTYVWQVLKENGPMASDPLCLTYSYLSHVDLVKDLNSGLIGALLVCREGSLAKEKTQTLHKFILLFAVFDEGKSWHSETKNSLMQDRDAASARAWPKMHTVNGYVNRSLPGLIGCHRKSVYWHVIGMGTTPEVHSIFLEGHTFLVRNHRQASLEISPITFLTAQTLLMDLGQFLLFCHISSHQHDGMEAYVKVDSCPEEPQLRMKNNEEAEDYDDDLTDSEMDVVRFDDDNSPSFIQIRSVAKKHPKTWVHYIAAEEEDWDYAPLVLAPDDRSYKSQYLNNGPQRIGRKYKKVRFMAYTDETFKTREAIQHESGILGPLLYGEVGDTLLIIFKNQASRPYNIYPHGITDVRPLYSRRLPKGVKHLKDFPILPGEIFKYKWTVTVEDGPTKSDPRCLTRYYSSFVNMERDLASGLIGPLLICYKESVDQRGNQIMSDKRNVILFSVFDENRSWYLTENIQRFLPNPAGVQLEDPEFQASNIMHSINGYVFDSLQLSVCLHEVAYWYILSIGAQTDFLSVFFSGYTFKHKMVYEDTLTLFPFSGETVFMSMENPGLWILGCHNSDFRNRGMTALLKVSSCDKNTGDYYEDSYEDISAYLLSKNNAIEPRSFSQNGGSPAGSPTSTEEGTSESATPESGPGTSTEPSEGSAPGSPAGSPTSTEEGTSTEPSEGSAPGTSTEPSEGSAPGTSESATPESGPGSEPATSGSETPGSEPATSGSETPGSPAGSPTSTEEGTSESATPESGPGTSTEPSEGSAPGTSTEPSEGSAPGSPAGSPTSTEEGTSTEPSEGSAPGTSTEPSEGSAPGTSESATPESGPGTSTEPSEGSAPGTSESATPESGPGSEPATSGSETPGTSTEPSEGSAPGTSTEPSEGSAPGTSESATPESGPGTSESATPESGPGSPAGSPTSTEEGTSESATPESGPGSEPATSGSETPGTSESATPESGPGTSTEPSEGSAPGTSTEPSEGSAPGTSTEPSEGSAPGTSTEPSEGSAPGTSTEPSEGSAPGTSTEPSEGSAPGSPAGSPTSTEEGTSTEPSEGSAPGTSESATPESGPGSEPATSGSETPGTSESATPESGPGSEPATSGSETPGTSESATPESGPGTSTEPSEGSAPGTSESATPESGPGSPAGSPTSTEEGSPAGSPTSTEEGSPAGSPTSTEEGTSESATPESGPGTSTEPSEGSAPGTSESATPESGPGSEPATSGSETPGTSESATPESGPGSEPATSGSETPGTSESATPESGPGTSTEPSEGSAPGSPAGSPTSTEEGTSESATPESGPGSEPATSGSETPGTSESATPESGPGSPAGSPTSTEEGSPAGSPTSTEEGTSTEPSEGSAPGTSESATPESGPGTSESATPESGPGTSESATPESGPGSEPATSGSETPGSEPATSGSETPGSPAGSPTSTEEGTSTEPSEGSAPGTSTEPSEGSAPGSEPATSGSETPGTSESATPESGPGTSTEPSEGSAPGPPVLKRHQREITRTTLQSDQEEIDYDDTISVEMKKEDFDIYDEDENQSPRSFQKKTRHYFIAAVERLWDYGMSSSPHVLRNRAQSGSVPQFKKVVFQEFTDGSFTQPLYRGELNEHLGLLGPYIRAEVEDNIMVTFRNQASRPYSFYSSLISYEEDQRQGAEPRKNFVKPNETKTYFWKVQHHMAPTKDEFDCKAWAYFSDVDLEKDVHSGLIGPLLVCHTNTLNPAHGRQVTVQEFALFFTIFDETKSWYFTENMERNCRAPCNIQMEDPTFKENYRFHAINGYIMDTLPGLVMAQDQRIRWYLLSMGSNENIHSIHFSGHVFTVRKKEEYKMALYNLYPGVFETVEMLPSKAGIWRVECLIGEHLHAGMSTLFLVYSNKCQTPLGMASGHIRDFQITASGQYGQWAPKLARLHYSGSINAWSTKEPFSWIKVDLLAPMIIHGIKTQGARQKFSSLYISQFIIMYSLDGKKWQTYRGNSTGTLMVFFGNVDSSGIKHNIFNPPIIARYIRLHPTHYSIRSTLRMELMGCDLNSCSMPLGMESKAISDAQITASSYFTNMFATWSPSKARLHLQGRSNAWRPQVNNPKEWLQVDFQKTMKVTGVTTQGVKSLLTSMYVKEFLISSSQDGHQWTLFFQNGKVKVFQGNQDSFTPVVNSLDPPLLTRYLRIHPQSWVHQIALRMEVLGCEAQDLY

SEQ ID NO: 1547 - protein, 1728 aa, synthetic construct
  REGION 1..1728: note = Description of Artificial Sequence: Synthetic polypeptide
ATRRYYLGAVELSWDYMQSDLGELPVDARFPPRVPKSFPFNTSVVYKKTLFVEFTVHLFNIAKPRPPWMGLLGPTIQAEVYDTVVITLKNMASHPVSLHAVGVSYWKASEGAEYDDQTSQREKEDDKVFPGGSHTYVWQVLKENGPMASDPLCLTYSYLSHVDLVKDLNSGLIGALLVCREGSLAKEKTQTLHKFILLFAVFDEGKSWHSETKNSLMQDRDAASARAWPKMHTVNGYVNRSLPGLIGCHRKSVYWHVIGMGTTPEVHSIFLEGHTFLVRNHRQASLEISPITFLTAQTLLMDLGQFLLFCHISSHQHDGMEAYVKVDSCPEEPQLRMKNNEEAEDYDDDLTDSEMDVVRFDDDNSPSFIQIRSVAKKHPKTWVHYIAAEEEDWDYAPLVLAPDDRSYKSQYLNNGPQRIGRKYKKVRFMAYTDETFKTREAIQHESGILGPLLYGEVGDTLLIIFKNQASRPYNIYPHGITDVRPLYSRRLPKGVKHLKDFPILPGEIFKYKWTVTVEDGPTKSDPRCLTRYYSSFVNMERDLASGLIGPLLICYKESVDQRGNQIMSDKRNVILFSVFDENRSWYLTENIQRFLPNPAGVQLEDPEFQASNIMHSINGYVFDSLQLSVCLHEVAYWYILSIGAQTDFLSVFFSGYTFKHKMVYEDTLTLFPFSGETVFMSMENPGLWILGCHNSDFRNRGMTALLKVSSCDKNTGDYYEDSYEDISAYLLSKNNAIEPRSFSQNGGTSESATPESGPGSEPATSGSETPGTSESATPESGPGSEPATSGSETPGTSESATPESGPGTSTEPSEGSAPGSPAGSPTSTEEGTSESATPESGPGSEPATSGSETPGTSESATPESGPGSPAGSPTSTEEGSPAGSPTSTEEGTSTEPSEGSAPGTSESATPESGPGTSESATPESGPGTSESATPESGPGSEPATSGSETPGSEPATSGSETPGSPAGSPTSTEEGTSTEPSEGSAPGTSTEPSEGSAPGSEPATSGSETPGTSESATPESGPGTSTEPSEGSAPGPPVLKRHQREITRTTLQSDQEEIDYDDTISVEMKKEDFDIYDEDENQSPRSFQKKTRHYFIAAVERLWDYGMSSSPHVLRNRAQSGSVPQFKKVVFQEFTDGSFTQPLYRGELNEHLGLLGPYIRAEVEDNIMVTFRNQASRPYSFYSSLISYEEDQRQGAEPRKNFVKPNETKTYFWKVQHHMAPTKDEFDCKAWAYFSDVDLEKDVHSGLIGPLLVCHTNTLNPAHGRQVTVQEFALFFTIFDETKSWYFTENMERNCRAPCNIQMEDPTFKENYRFHAINGYIMDTLPGLVMAQDQRIRWYLLSMGSNENIHSIHFSGHVFTVRKKEEYKMALYNLYPGVFETVEMLPSKAGIWRVECLIGEHLHAGMSTLFLVYSNKCQTPLGMASGHIRDFQITASGQYGQWAPKLARLHYSGSINAWSTKEPFSWIKVDLLAPMIIHGIKTQGARQKFSSLYISQFIIMYSLDGKKWQTYRGNSTGTLMVFFGNVDSSGIKHNIFNPPIIARYIRLHPTHYSIRSTLRMELMGCDLNSCSMPLGMESKAISDAQITASSYFTNMFATWSPSKARLHLQGRSNAWRPQVNNPKEWLQVDFQKTMKVTGVTTQGVKSLLTSMYVKEFLISSSQDGHQWTLFFQNGKVKVFQGNQDSFTPVVNSLDPPLLTRYLRIHPQSWVHQIALRMEVLGCEAQDLY

SEQ ID NO: 1548 - protein, 1728 aa, synthetic construct
  REGION 1..1728: note = Description of Artificial Sequence: Synthetic polypeptide
ATRRYYLGAVELSWDYMQSDLGELPVDARFPPRVPKSFPFNTSVVYKKTLFVEFTVHLFNIAKPRPPWMGLLGPTIQAEVYDTVVITLKNMASHPVSLHAVGVSYWKASEGAEYDDQTSQREKEDDKVFPGGSHTYVWQVLKENGPMASDPLCLTYSYLSHVDLVKDLNSGLIGALLVCREGSLAKEKTQTLHKFILLFAVFDEGKSWHSETKNSLMQDRDAASARAWPKMHTVNGYVNRSLPGLIGCHRKSVYWHVIGMGTTPEVHSIFLEGHTFLVRNHRQASLEISPITFLTAQTLLMDLGQFLLFCHISSHQHDGMEAYVKVDSCPEEPQLRMKNNEEAEDYDDDLTDSEMDVVRFDDDNSPSFIQIRSVAKKHPKTWVHYIAAEEEDWDYAPLVLAPDDRSYKSQYLNNGPQRIGRKYKKVRFMAYTDETFKTREAIQHESGILGPLLYGEVGDTLLIIFKNQASRPYNIYPHGITDVRPLYSRRLPKGVKHLKDFPILPGEIFKYKWTVTVEDGPTKSDPRCLTRYYSSFVNMERDLASGLIGPLLICYKESVDQRGNQIMSDKRNVILFSVFDENRSWYLTENIQRFLPNPAGVQLEDPEFQASNIMHSINGYVFDSLQLSVCLHEVAYWYILSIGAQTDFLSVFFSGYTFKHKMVYEDTLTLFPFSGETVFMSMENPGLWILGCHNSDFRNRGMTALLKVSSCDKNTGDYYEDSYEDISAYLLSKNNAIEPRSFSGGTSESATPESGPGSEPATSGSETPGTSESATPESGPGSEPATSGSETPGTSESATPESGPGTSTEPSEGSAPGSPAGSPTSTEEGTSESATPESGPGSEPATSGSETPGTSESATPESGPGSPAGSPTSTEEGSPAGSPTSTEEGTSTEPSEGSAPGTSESATPESGPGTSESATPESGPGTSESATPESGPGSEPATSGSETPGSEPATSGSETPGSPAGSPTSTEEGTSTEPSEGSAPGTSTEPSEGSAPGSEPATSGSETPGTSESATPESGPGTSTEPSEGSAPGQNPPVLKRHQREITRTTLQSDQEEIDYDDTISVEMKKEDFDIYDEDENQSPRSFQKKTRHYFIAAVERLWDYGMSSSPHVLRNRAQSGSVPQFKKVVFQEFTDGSFTQPLYRGELNEHLGLLGPYIRAEVEDNIMVTFRNQASRPYSFYSSLISYEEDQRQGAEPRKNFVKPNETKTYFWKVQHHMAPTKDEFDCKAWAYFSDVDLEKDVHSGLIGPLLVCHTNTLNPAHGRQVTVQEFALFFTIFDETKSWYFTENMERNCRAPCNIQMEDPTFKENYRFHAINGYIMDTLPGLVMAQDQRIRWYLLSMGSNENIHSIHFSGHVFTVRKKEEYKMALYNLYPGVFETVEMLPSKAGIWRVECLIGEHLHAGMSTLFLVYSNKCQTPLGMASGHIRDFQITASGQYGQWAPKLARLHYSGSINAWSTKEPFSWIKVDLLAPMIIHGIKTQGARQKFSSLYISQFIIMYSLDGKKWQTYRGNSTGTLMVFFGNVDSSGIKHNIFNPPIIARYIRLHPTHYSIRSTLRMELMGCDLNSCSMPLGMESKAISDAQITASSYFTNMFATWSPSKARLHLQGRSNAWRPQVNNPKEWLQVDFQKTMKVTGVTTQGVKSLLTSMYVKEFLISSSQDGHQWTLFFQNGKVKVFQGNQDSFTPVVNSLDPPLLTRYLRIHPQSWVHQIALRMEVLGCEAQDLY

SEQ ID NO: 1549 - protein, 2046 aa, synthetic construct
  REGION 1..2046: note = Description of Artificial Sequence: Synthetic polypeptide
ATRRYYLGAVELSWDYMQSDLGELPVDARFPPRVPKSFPFNTSVVYKKTLFVEFTVHLFNIAKPRPPWMGLLGPTIQAEVYDTVVITLKNMASHPVSLHAVGVSYWKASEGAEYDDQTSQREKEDDKVFPGGSHTYVWQVLKENGPMASDPLCLTYSYLSHVDLVKDLNSGLIGALLVCREGSLAKEKTQTLHKFILLFAVFDEGKSWHSETKNSLMQDRDAASARAWPKMHTVNGYVNRSLPGLIGCHRKSVYWHVIGMGTTPEVHSIFLEGHTFLVRNHRQASLEISPITFLTAQTLLMDLGQFLLFCHISSHQHDGMEAYVKVDSCPEEPQLRMKNNEEAEDYDDDLTDSEMDVVRFDDDNSPSFIQIRSVAKKHPKTWVHYIAAEEEDWDYAPLVLAPDDRSYKSQYLNNGPQRIGRKYKKVRFMAYTDETFKTREAIQHESGILGPLLYGEVGDTLLIIFKNQASRPYNIYPHGITDVRPLYSRRLPKGVKHLKDFPILPGEIFKYKWTVTVEDGPTKSDPRCLTRYYSSFVNMERDLASGLIGPLLICYKESVDQRGNQIMSDKRNVILFSVFDENRSWYLTENIQRFLPNPAGVQLEDPEFQASNIMHSINGYVFDSLQLSVCLHEVAYWYILSIGAQTDFLSVFFSGYTFKHKMVYEDTLTLFPFSGETVFMSMENPGLWILGCHNSDFRNRGMTALLKVSSCDKNTGDYYEDSYEDISAYLLSKNNAIEPRSFSQNGPGASPGTSSTGSPGASPGTSSTGSPGTPGSGTASSSPGSSTPSGATGSPGTPGSGTASSSPGSSTPSGATGSPGTPGSGTASSSPGSSTPSGATGSPGSSTPSGATGSPGSSPSASTGTGPGSSPSASTGTGPGASPGTSSTGSPGTPGSGTASSSPGSSTPSGATGSPGSSPSASTGTGPGSSPSASTGTGPGASPGTSSTGSPGASPGTSSTGSPGSSTPSGATGSPGSSPSASTGTGPGASPGTSSTGSPGSSPSASTGTGPGTPGSGTASSSPGSSTPSGATGSGPPVLKRHQREITRTTLQSDQEEIDYDDTISVEMKKEDFDIYDEDENQSPRSFQKKTRHYFIAAVERLWDYGMSSSPHVLRNRAQSGSVPQFKKVVFQEFTDGSFTQPLYRGELNEHLGLLGPYIRAEVEDNIMVTFRNQASRPYSFYSSLISYEEDQRQGAEPRKNFVKPNETKTYFWKVQHHMAPTKDEFDCKAWAYFSDVDLEKDVHSGLIGPLLVCHTNTLNPAHGRQVTVQEFALFFTIFDETKSWYFTENMERNCRAPCNIQMEDPTFKENYRFHAINGYIMDTLPGLVMAQDQRIRWYLLSMGSNENIHSIHFSGHVFTVRKKEEYKMALYNLYPGVFETVEMLPSKAGIWRVECLIGEHLHAGMSTLFLVYSNKCQTPLGMASGHIRDFQITASGQYGQWAPKLARLHYSGSINAWSTKEPFSWIKVDLLAPMIIHGIKTQGARQKFSSLYISQFIIMYSLDGKKWQTYRGNSTGTLMVFFGNVDSSGIKHNIFNPPIIARYIRLHPTHYSIRSTLRMELMGCDLNSCSMPLGMESKAISDAQITASSYFTNMFATWSPSKARLHLQGRSNAWRPQVNNPKEWLQVDFQKTMKVTGVTTQGVKSLLTSMYVKEFLISSSQDGHQWTLFFQNGKVKVFQGNQDSFTPVVNSLDPPLLTRYLRIHPQSWVHQIALRMEVLGCEAQDLYGAGSPGAETAPGASPGTSSTGSPGASPGTSSTGSPGTPGSGTASSSPGSSTPSGATGSPGTPGSGTASSSPGSSTPSGATGSPGTPGSGTASSSPGSSTPSGATGSPGSSTPSGATGSPGSSPSASTGTGPGSSPSASTGTGPGASPGTSSTGSPGTPGSGTASSSPGSSTPSGATGSPGSSPSASTGTGPGSSPSASTGTGPGASPGTSSTGSPGASPGTSSTGSPGSSTPSGATGSPGSSPSASTGTGPGASPGTSSTGSPGSSPSASTGTGPGTPGSGTASSSPGSSTPSGATGSGAETAEQKLISEEDLSPATG

SEQ ID NO: 1550 - protein, 2046 aa, synthetic construct
  REGION 1..2046: note = Description of Artificial Sequence: Synthetic polypeptide
ATRRYYLGAVELSWDYMQSDLGELPVDARFPPRVPKSFPFNTSVVYKKTLFVEFTVHLFNIAKPRPPWMGLLGPTIQAEVYDTVVITLKNMASHPVSLHAVGVSYWKASEGAEYDDQTSQREKEDDKVFPGGSHTYVWQVLKENGPMASDPLCLTYSYLSHVDLVKDLNSGLIGALLVCREGSLAKEKTQTLHKFILLFAVFDEGKSWHSETKNSLMQDRDAASARAWPKMHTVNGYVNRSLPGLIGCHRKSVYWHVIGMGTTPEVHSIFLEGHTFLVRNHRQASLEISPITFLTAQTLLMDLGQFLLFCHISSHQHDGMEAYVKVDSCPEEPQLRMKNNEEAEDYDDDLTDSEMDVVRFDDDNSPSFIQIRSVAKKHPKTWVHYIAAEEEDWDYAPLVLAPDDRSYKSQYLNNGPQRIGRKYKKVRFMAYTDETFKTREAIQHESGILGPLLYGEVGDTLLIIFKNQASRPYNIYPHGITDVRPLYSRRLPKGVKHLKDFPILPGEIFKYKWTVTVEDGPTKSDPRCLTRYYSSFVNMERDLASGLIGPLLICYKESVDQRGNQIMSDKRNVILFSVFDENRSWYLTENIQRFLPNPAGVQLEDPEFQASNIMHSINGYVFDSLQLSVCLHEVAYWYILSIGAQTDFLSVFFSGYTFKHKMVYEDTLTLFPFSGETVFMSMENPGLWILGCHNSDFRNRGMTALLKVSSCDKNTGDYYEDSYEDISAYLLSKNNAIEPRSFSGPGASPGTSSTGSPGASPGTSSTGSPGTPGSGTASSSPGSSTPSGATGSPGTPGSGTASSSPGSSTPSGATGSPGTPGSGTASSSPGSSTPSGATGSPGSSTPSGATGSPGSSPSASTGTGPGSSPSASTGTGPGASPGTSSTGSPGTPGSGTASSSPGSSTPSGATGSPGSSPSASTGTGPGSSPSASTGTGPGASPGTSSTGSPGASPGTSSTGSPGSSTPSGATGSPGSSPSASTGTGPGASPGTSSTGSPGSSPSASTGTGPGTPGSGTASSSPGSSTPSGATGSGQNPPVLKRHQREITRTTLQSDQEEIDYDDTISVEMKKEDFDIYDEDENQSPRSFQKKTRHYFIAAVERLWDYGMSSSPHVLRNRAQSGSVPQFKKVVFQEFTDGSFTQPLYRGELNEHLGLLGPYIRAEVEDNIMVTFRNQASRPYSFYSSLISYEEDQRQGAEPRKNFVKPNETKTYFWKVQHHMAPTKDEFDCKAWAYFSDVDLEKDVHSGLIGPLLVCHTNTLNPAHGRQVTVQEFALFFTIFDETKSWYFTENMERNCRAPCNIQMEDPTFKENYRFHAINGYIMDTLPGLVMAQDQRIRWYLLSMGSNENIHSIHFSGHVFTVRKKEEYKMALYNLYPGVFETVEMLPSKAGIWRVECLIGEHLHAGMSTLFLVYSNKCQTPLGMASGHIRDFQITASGQYGQWAPKLARLHYSGSINAWSTKEPFSWIKVDLLAPMIIHGIKTQGARQKFSSLYISQFIIMYSLDGKKWQTYRGNSTGTLMVFFGNVDSSGIKHNIFNPPIIARYIRLHPTHYSIRSTLRMELMGCDLNSCSMPLGMESKAISDAQITASSYFTNMFATWSPSKARLHLQGRSNAWRPQVNNPKEWLQVDFQKTMKVTGVTTQGVKSLLTSMYVKEFLISSSQDGHQWTLFFQNGKVKVFQGNQDSFTPVVNSLDPPLLTRYLRIHPQSWVHQIALRMEVLGCEAQDLYGAGSPGAETAPGASPGTSSTGSPGASPGTSSTGSPGTPGSGTASSSPGSSTPSGATGSPGTPGSGTASSSPGSSTPSGATGSPGTPGSGTASSSPGSSTPSGATGSPGSSTPSGATGSPGSSPSASTGTGPGSSPSASTGTGPGASPGTSSTGSPGTPGSGTASSSPGSSTPSGATGSPGSSPSASTGTGPGSSPSASTGTGPGASPGTSSTGSPGASPGTSSTGSPGSSTPSGATGSPGSSPSASTGTGPGASPGTSSTGSPGSSPSASTGTGPGTPGSGTASSSPGSSTPSGATGSGAETAEQKLISEEDLSPATG

SEQ ID NO: 1551 - protein, 2017 aa, synthetic construct
  REGION 1..2017: note = Description of Artificial Sequence: Synthetic polypeptide
ATRRYYLGAVELSWDYMQSDLGELPVDARFPPRVPKSFPFNTSVVYKKTLFVEFTDHLFNIAKPRPPWMGLLGPTIQAEVYDTVVITLKNMASHPVSLHAVGVSYWKASEGAEYDDQTSQREKEDDKVFPGGSHTYVWQVLKENGPMASDPLCLTYSYLSHVDLVKDLNSGLIGALLVCREGSLAKEKTQTLHKFILLFAVFDEGKSWHSETKNSLMQDRDAASARAWPKMHTVNGYVNRSLPGLIGCHRKSVYWHVIGMGTTPEVHSIFLEGHTFLVRNHRQASLEISPITFLTAQTLLMDLGQFLLFCHISSHQHDGMEAYVKVDSCPEEPQLRMKNNEEAEDYDDDLTDSEMDVVRFDDDNSPSFIQIRSVAKKHPKTWVHYIAAEEEDWDYAPLVLAPDDRSYKSQYLNNGPQRIGRKYKKVRFMAYTDETFKTREAIQHESGILGPLLYGEVGDTLLIIFKNQASRPYNIYPHGITDVRPLYSRRLPKGVKHLKDFPILPGEIFKYKWTVTVEDGPTKSDPRCLTRYYSSFVNMERDLASGLIGPLLICYKESVDQRGNQIMSDKRNVILFSVFDENRSWYLTENIQRFLPNPAGVQLEDPEFQASNIMHSINGYVFDSLQLSVCLHEVAYWYILSIGAQTDFLSVFFSGYTFKHKMVYEDTLTLFPFSGETVFMSMENPGLWILGCHNSDFRNRGMTALLKVSSCDKNTGDYYEDSYEDISAYLLSKNNAIEPRSFSQNGGTSESATPESGPGSEPATSGSETPGTSESATPESGPGSEPATSGSETPGTSESATPESGPGTSTEPSEGSAPGSPAGSPTSTEEGTSESATPESGPGSEPATSGSETPGTSESATPESGPGSPAGSPTSTEEGSPAGSPTSTEEGTSTEPSEGSAPGTSESATPESGPGTSESATPESGPGTSESATPESGPGSEPATSGSETPGSEPATSGSETPGSPAGSPTSTEEGTSTEPSEGSAPGTSTEPSEGSAPGSEPATSGSETPGTSESATPESGPGTSTEPSEGSAPGPPVLKRHQAEITRTTLQSDQEEIDYDDTISVEMKKEDFDIYDEDENQSPRSFQKKTRHYFIAAVERLWDYGMSSSPHVLRNRAQSGSVPQFKKVVFQEFTDGSFTQPLYRGELNEHLGLLGPYIRAEVEDNIMVTFRNQASRPYSFYSSLISYEEDQRQGAEPRKNFVKPNETKTYFWKVQHHMAPTKDEFDCKAWAYFSDVDLEKDVHSGLIGPLLVCHTNTLNPAHGRQVTVQEFALFFTIFDETKSWYFTENMERNCRAPCNIQMEDPTFKENYRFHAINGYIMDTLPGLVMAQDQRIRWYLLSMGSNENIHSIHFSGHVFTVRKKEEYKMALYNLYPGVFETVEMLPSKAGIWRVECLIGEHLHAGMSTLFLVYSNKCQTPLGMASGHIRDFQITASGQYGQWAPKLARLHYSGSINAWSTKEPFSWIKVDLLAPMIIHGIKTQGARQKFSSLYISQFIIMYSLDGKKWQTYRGNSTGTLMVFFGNVDSSGIKHNIFNPPIIARYIRLHPTHYSIRSTLRMELMGCDLNSCSMPLGMESKAISDAQITASSYFTNMFATWSPSKARLHLQGRSNAWRPQVNNPKEWLQVDFQKTMKVTGVTTQGVKSLLTSMYVKEFLISSSQDGHQWTLFFQNGKVKVFQGNQDSFTPVVNSLDPPLLTRYLRIHPQSWVHQIALRMEVLGCEAQDLYGGTSESATPESGPGSEPATSGSETPGTSESATPESGPGSEPATSGSETPGTSESATPESGPGTSTEPSEGSAPGSPAGSPTSTEEGTSESATPESGPGSEPATSGSETPGTSESATPESGPGSPAGSPTSTEEGSPAGSPTSTEEGTSTEPSEGSAPGTSESATPESGPGTSESATPESGPGTSESATPESGPGSEPATSGSETPGSEPATSGSETPGSPAGSPTSTEEGTSTEPSEGSAPGTSTEPSEGSAPGSEPATSGSETPGTSESATPESGPGTSTEPSEGSAP

SEQ ID NO: 1552 - protein, 2017 aa, synthetic construct
  REGION 1..2017: note = Description of Artificial Sequence: Synthetic polypeptide
ATRRYYLGAVELSWDYMQSDLGELPVDARFPPRVPKSFPFNTSVVYKKTLFVEFTDHLFNIAKPRPPWMGLLGPTIQAEVYDTVVITLKNMASHPVSLHAVGVSYWKASEGAEYDDQTSQREKEDDKVFPGGSHTYVWQVLKENGPMASDPLCLTYSYLSHVDLVKDLNSGLIGALLVCREGSLAKEKTQTLHKFILLFAVFDEGKSWHSETKNSLMQDRDAASARAWPKMHTVNGYVNRSLPGLIGCHRKSVYWHVIGMGTTPEVHSIFLEGHTFLVRNHRQASLEISPITFLTAQTLLMDLGQFLLFCHISSHQHDGMEAYVKVDSCPEEPQLRMKNNEEAEDYDDDLTDSEMDVVRFDDDNSPSFIQIRSVAKKHPKTWVHYIAAEEEDWDYAPLVLAPDDRSYKSQYLNNGPQRIGRKYKKVRFMAYTDETFKTREAIQHESGILGPLLYGEVGDTLLIIFKNQASRPYNIYPHGITDVRPLYSRRLPKGVKHLKDFPILPGEIFKYKWTVTVEDGPTKSDPRCLTRYYSSFVNMERDLASGLIGPLLICYKESVDQRGNQIMSDKRNVILFSVFDENRSWYLTENIQRFLPNPAGVQLEDPEFQASNIMHSINGYVFDSLQLSVCLHEVAYWYILSIGAQTDFLSVFFSGYTFKHKMVYEDTLTLFPFSGETVFMSMENPGLWILGCHNSDFRNRGMTALLKVSSCDKNTGDYYEDSYEDISAYLLSKNNAIEPRSFSGGTSESATPESGPGSEPATSGSETPGTSESATPESGPGSEPATSGSETPGTSESATPESGPGTSTEPSEGSAPGSPAGSPTSTEEGTSESATPESGPGSEPATSGSETPGTSESATPESGPGSPAGSPTSTEEGSPAGSPTSTEEGTSTEPSEGSAPGTSESATPESGPGTSESATPESGPGTSESATPESGPGSEPATSGSETPGSEPATSGSETPGSPAGSPTSTEEGTSTEPSEGSAPGTSTEPSEGSAPGSEPATSGSETPGTSESATPESGPGTSTEPSEGSAPGQNPPVLKRHQAEITRTTLQSDQEEIDYDDTISVEMKKEDFDIYDEDENQSPRSFQKKTRHYFIAAVERLWDYGMSSSPHVLRNRAQSGSVPQFKKVVFQEFTDGSFTQPLYRGELNEHLGLLGPYIRAEVEDNIMVTFRNQASRPYSFYSSLISYEEDQRQGAEPRKNFVKPNETKTYFWKVQHHMAPTKDEFDCKAWAYFSDVDLEKDVHSGLIGPLLVCHTNTLNPAHGRQVTVQEFALFFTIFDETKSWYFTENMERNCRAPCNIQMEDPTFKENYRFHAINGYIMDTLPGLVMAQDQRIRWYLLSMGSNENIHSIHFSGHVFTVRKKEEYKMALYNLYPGVFETVEMLPSKAGIWRVECLIGEHLHAGMSTLFLVYSNKCQTPLGMASGHIRDFQITASGQYGQWAPKLARLHYSGSINAWSTKEPFSWIKVDLLAPMIIHGIKTQGARQKFSSLYISQFIIMYSLDGKKWQTYRGNSTGTLMVFFGNVDSSGIKHNIFNPPIIARYIRLHPTHYSIRSTLRMELMGCDLNSCSMPLGMESKAISDAQITASSYFTNMFATWSPSKARLHLQGRSNAWRPQVNNPKEWLQVDFQKTMKVTGVTTQGVKSLLTSMYVKEFLISSSQDGHQWTLFFQNGKVKVFQGNQDSFTPVVNSLDPPLLTRYLRIHPQSWVHQIALRMEVLGCEAQDLYGGTSESATPESGPGSEPATSGSETPGTSESATPESGPGSEPATSGSETPGTSESATPESGPGTSTEPSEGSAPGSPAGSPTSTEEGTSESATPESGPGSEPATSGSETPGTSESATPESGPGSPAGSPTSTEEGSPAGSPTSTEEGTSTEPSEGSAPGTSESATPESGPGTSESATPESGPGTSESATPESGPGSEPATSGSETPGSEPATSGSETPGSPAGSPTSTEEGTSTEPSEGSAPGTSTEPSEGSAPGSEPATSGSETPGTSESATPESGPGTSTEPSEGSAP

SEQ ID NO: 1553 - protein, 2045 aa, synthetic construct
  REGION 1..2045: note = Description of Artificial Sequence: Synthetic polypeptide
ATRRYYLGAVELSWDYMQSDLGELPVDARFPPRVPKSFPFNTSVVYKKTLFVEFTDHLFNIAKPRPPWMGLLGPTIQAEVYDTVVITLKNMASHPVSLHAVGVSYWKASEGAEYDDQTSQREKEDDKVFPGGSHTYVWQVLKENGPMASDPLCLTYSYLSHVDLVKDLNSGLIGALLVCREGSLAKEKTQTLHKFILLFAVFDEGKSWHSETKNSLMQDRDAASARAWPKMHTVNGYVNRSLPGLIGCHRKSVYWHVIGMGTTPEVHSIFLEGHTFLVRNHRQASLEISPITFLTAQTLLMDLGQFLLFCHISSHQHDGMEAYVKVDSCPEEPQLRMKNNEEAEDYDDDLTDSEMDVVRFDDDNSPSFIQIRSVAKKHPKTWVHYIAAEEEDWDYAPLVLAPDDRSYKSQYLNNGPQRIGRKYKKVRFMAYTDETFKTREAIQHESGILGPLLYGEVGDTLLIIFKNQASRPYNIYPHGITDVRPLYSRRLPKGVKHLKDFPILPGEIFKYKWTVTVEDGPTKSDPRCLTRYYSSFVNMERDLASGLIGPLLICYKESVDQRGNQIMSDKRNVILFSVFDENRSWYLTENIQRFLPNPAGVQLEDPEFQASNIMHSINGYVFDSLQLSVCLHEVAYWYILSIGAQTDFLSVFFSGYTFKHKMVYEDTLTLFPFSGETVFMSMENPGLWILGCHNSDFRNRGMTALLKVSSCDKNTGDYYEDSYEDISAYLLSKNNAIEPRSFSQNGPGASPGTSSTGSPGASPGTSSTGSPGTPGSGTASSSPGSSTPSGATGSPGTPGSGTASSSPGSSTPSGATGSPGTPGSGTASSSPGSSTPSGATGSPGSSTPSGATGSPGSSPSASTGTGPGSSPSASTGTGPGASPGTSSTGSPGTPGSGTASSSPGSSTPSGATGSPGSSPSASTGTGPGSSPSASTGTGPGASPGTSSTGSPGASPGTSSTGSPGSSTPSGATGSPGSSPSASTGTGPGASPGTSSTGSPGSSPSASTGTGPGTPGSGTASSSPGSSTPSGATGSPPVLKRHQAEITRTTLQSDQEEIDYDDTISVEMKKEDFDIYDEDENQSPRSFQKKTRHYFIAAVERLWDYGMSSSPHVLRNRAQSGSVPQFKKVVFQEFTDGSFTQPLYRGELNEHLGLLGPYIRAEVEDNIMVTFRNQASRPYSFYSSLISYEEDQRQGAEPRKNFVKPNETKTYFWKVQHHMAPTKDEFDCKAWAYFSDVDLEKDVHSGLIGPLLVCHTNTLNPAHGRQVTVQEFALFFTIFDETKSWYFTENMERNCRAPCNIQMEDPTFKENYRFHAINGYIMDTLPGLVMAQDQRIRWYLLSMGSNENIHSIHFSGHVFTVRKKEEYKMALYNLYPGVFETVEMLPSKAGIWRVECLIGEHLHAGMSTLFLVYSNKCQTPLGMASGHIRDFQITASGQYGQWAPKLARLHYSGSINAWSTKEPFSWIKVDLLAPMIIHGIKTQGARQKFSSLYISQFIIMYSLDGKKWQTYRGNSTGTLMVFFGNVDSSGIKHNIFNPPIIARYIRLHPTHYSIRSTLRMELMGCDLNSCSMPLGMESKAISDAQITASSYFTNMFATWSPSKARLHLQGRSNAWRPQVNNPKEWLQVDFQKTMKVTGVTTQGVKSLLTSMYVKEFLISSSQDGHQWTLFFQNGKVKVFQGNQDSFTPVVNSLDPPLLTRYLRIHPQSWVHQIALRMEVLGCEAQDLYGAGSPGAETAPGASPGTSSTGSPGASPGTSSTGSPGTPGSGTASSSPGSSTPSGATGSPGTPGSGTASSSPGSSTPSGATGSPGTPGSGTASSSPGSSTPSGATGSPGSSTPSGATGSPGSSPSASTGTGPGSSPSASTGTGPGASPGTSSTGSPGTPGSGTASSSPGSSTPSGATGSPGSSPSASTGTGPGSSPSASTGTGPGASPGTSSTGSPGASPGTSSTGSPGSSTPSGATGSPGSSPSASTGTGPGASPGTSSTGSPGSSPSASTGTGPGTPGSGTASSSPGSSTPSGATGSGAETAEQKLISEEDLSPATG

SEQ ID NO: 1554 - protein, 2045 aa, synthetic construct
  REGION 1..2045: note = Description of Artificial Sequence: Synthetic polypeptide
ATRRYYLGAVELSWDYMQSDLGELPVDARFPPRVPKSFPFNTSVVYKKTLFVEFTDHLFNIAKPRPPWMGLLGPTIQAEVYDTVVITLKNMASHPVSLHAVGVSYWKASEGAEYDDQTSQREKEDDKVFPGGSHTYVWQVLKENGPMASDPLCLTYSYLSHVDLVKDLNSGLIGALLVCREGSLAKEKTQTLHKFILLFAVFDEGKSWHSETKNSLMQDRDAASARAWPKMHTVNGYVNRSLPGLIGCHRKSVYWHVIGMGTTPEVHSIFLEGHTFLVRNHRQASLEISPITFLTAQTLLMDLGQFLLFCHISSHQHDGMEAYVKVDSCPEEPQLRMKNNEEAEDYDDDLTDSEMDVVRFDDDNSPSFIQIRSVAKKHPKTWVHYIAAEEEDWDYAPLVLAPDDRSYKSQYLNNGPQRIGRKYKKVRFMAYTDETFKTREAIQHESGILGPLLYGEVGDTLLIIFKNQASRPYNIYPHGITDVRPLYSRRLPKGVKHLKDFPILPGEIFKYKWTVTVEDGPTKSDPRCLTRYYSSFVNMERDLASGLIGPLLICYKESVDQRGNQIMSDKRNVILFSVFDENRSWYLTENIQRFLPNPAGVQLEDPEFQASNIMHSINGYVFDSLQLSVCLHEVAYWYILSIGAQTDFLSVFFSGYTFKHKMVYEDTLTLFPFSGETVFMSMENPGLWILGCHNSDFRNRGMTALLKVSSCDKNTGDYYEDSYEDISAYLLSKNNAIEPRSFSGPGASPGTSSTGSPGASPGTSSTGSPGTPGSGTASSSPGSSTPSGATGSPGTPGSGTASSSPGSSTPSGATGSPGTPGSGTASSSPGSSTPSGATGSPGSSTPSGATGSPGSSPSASTGTGPGSSPSASTGTGPGASPGTSSTGSPGTPGSGTASSSPGSSTPSGATGSPGSSPSASTGTGPGSSPSASTGTGPGASPGTSSTGSPGASPGTSSTGSPGSSTPSGATGSPGSSPSASTGTGPGASPGTSSTGSPGSSPSASTGTGPGTPGSGTASSSPGSSTPSGATGSQNPPVLKRHQAEITRTTLQSDQEEIDYDDTISVEMKKEDFDIYDEDENQSPRSFQKKTRHYFIAAVERLWDYGMSSSPHVLRNRAQSGSVPQFKKVVFQEFTDGSFTQPLYRGELNEHLGLLGPYIRAEVEDNIMVTFRNQASRPYSFYSSLISYEEDQRQGAEPRKNFVKPNETKTYFWKVQHHMAPTKDEFDCKAWAYFSDVDLEKDVHSGLIGPLLVCHTNTLNPAHGRQVTVQEFALFFTIFDETKSWYFTENMERNCRAPCNIQMEDPTFKENYRFHAINGYIMDTLPGLVMAQDQRIRWYLLSMGSNENIHSIHFSGHVFTVRKKEEYKMALYNLYPGVFETVEMLPSKAGIWRVECLIGEHLHAGMSTLFLVYSNKCQTPLGMASGHIRDFQITASGQYGQWAPKLARLHYSGSINAWSTKEPFSWIKVDLLAPMIIHGIKTQGARQKFSSLYISQFIIMYSLDGKKWQTYRGNSTGTLMVFFGNVDSSGIKHNIFNPPIIARYIRLHPTHYSIRSTLRMELMGCDLNSCSMPLGMESKAISDAQITASSYFTNMFATWSPSKARLHLQGRSNAWRPQVNNPKEWLQVDFQKTMKVTGVTTQGVKSLLTSMYVKEFLISSSQDGHQWTLFFQNGKVKVFQGNQDSFTPVVNSLDPPLLTRYLRIHPQSWVHQIALRMEVLGCEAQDLYGAGSPGAETAPGASPGTSSTGSPGASPGTSSTGSPGTPGSGTASSSPGSSTPSGATGSPGTPGSGTASSSPGSSTPSGATGSPGTPGSGTASSSPGSSTPSGATGSPGSSTPSGATGSPGSSPSASTGTGPGSSPSASTGTGPGASPGTSSTGSPGTPGSGTASSSPGSSTPSGATGSPGSSPSASTGTGPGSSPSASTGTGPGASPGTSSTGSPGASPGTSSTGSPGSSTPSGATGSPGSSPSASTGTGPGASPGTSSTGSPGSSPSASTGTGPGTPGSGTASSSPGSSTPSGATGSGAETAEQKLISEEDLSPATG

SEQ ID NO: 1555 - protein, 2301 aa, synthetic construct
  REGION 1..2301: note = Description of Artificial Sequence: Synthetic polypeptide
MQIELSTCFFLCLLRFCFSGTSESATPESGPGSEPATSGSETPGTSESATPESGPGSEPATSGSETPGTSESATPESGPGTSTEPSEGSAPGSPAGSPTSTEEGTSESATPESGPGSEPATSGSETPGTSESATPESGPGSPAGSPTSTEEGSPAGSPTSTEEGTSTEPSEGSAPGTSESATPESGPGTSESATPESGPGTSESATPESGPGSEPATSGSETPGSEPATSGSETPGSPAGSPTSTEEGTSTEPSEGSAPGTSTEPSEGSAPGSEPATSGSETPGTSESATPESGPGTSTEPSEGSAPQSPRSFQGPEGPSATRRYYLGAVELSWDYMQSDLGELPVDARFPPRVPKSFPFNTSVVYKKTLFVEFTVHLFNIAKPRPPWMGLLGPTIQAEVYDTVVITLKNMASHPVSLHAVGVSYWKASEGAEYDDQTSQREKEDDKVFPGGSHTYVWQVLKENGPMASDPLCLTYSYLSHVDLVKDLNSGLIGALLVCREGSLAKEKTQTLHKFILLFAVFDEGKSWHSETKNSLMQDRDAASARAWPKMHTVNGYVNRSLPGLIGCHRKSVYWHVIGMGTTPEVHSIFLEGHTFLVRNHRQASLEISPITFLTAQTLLMDLGQFLLFCHISSHQHDGMEAYVKVDSCPEEPQLRMKNNEEAEDYDDDLTDSEMDVVRFDDDNSPSFIQIRSVAKKHPKTWVHYIAAEEEDWDYAPLVLAPDDRSYKSQYLNNGPQRIGRKYKKVRFMAYTDETFKTREAIQHESGILGPLLYGEVGDTLLIIFKNQASRPYNIYPHGITDVRPLYSRRLPKGVKHLKDFPILPGEIFKYKWTVTVEDGPTKSDPRCLTRYYSSFVNMERDLASGLIGPLLICYKESVDQRGNQIMSDKRNVILFSVFDENRSWYLTENIQRFLPNPAGVQLEDPEFQASNIMHSINGYVFDSLQLSVCLHEVAYWYILSIGAQTDFLSVFFSGYTFKHKMVYEDTLTLFPFSGETVFMSMENPGLWILGCHNSDFRNRGMTALLKVSSCDKNTGDYYEDSYEDISAYLLSKNNAIEPRSFSQNGTSESATPESGPGSEPATSGSETPGTSESATPESGPGSEPATSGSETPGTSESATPESGPGTSTEPSEGSAPGSPAGSPTSTEEGTSESATPESGPGSEPATSGSETPGTSESATPESGPGSPAGSPTSTEEGSPAGSPTSTEEGTSTEPSEGSAPGTSESATPESGPGTSESATPESGPGTSESATPESGPGSEPATSGSETPGSEPATSGSETPGSPAGSPTSTEEGTSTEPSEGSAPGTSTEPSEGSAPGSEPATSGSETPGTSESATPESGPGTSTEPSEGSAPQSPRSFQKKTRHYFIAAVERLWDYGMSSSPHVLRNRAQSGSVPQFKKVVFQEFTDGSFTQPLYRGELNEHLGLLGPYIRAEVEDNIMVTFRNQASRPYSFYSSLISYEEDQRQGAEPRKNFVKPNETKTYFWKVQHHMAPTKDEFDCKAWAYFSDVDLEKDVHSGLIGPLLVCHTNTLNPAHGRQVTVQEFALFFTIFDETKSWYFTENMERNCRAPCNIQMEDPTFKENYRFHAINGYIMDTLPGLVMAQDQRIRWYLLSMGSNENIHSIHFSGHVFTVRKKEEYKMALYNLYPGVFETVEMLPSKAGIWRVECLIGEHLHAGMSTLFLVYSNKCQTPLGMASGHIRDFQITASGQYGQWAPKLARLHYSGSINAWSTKEPFSWIKVDLLAPMIIHGIKTQGARQKFSSLYISQFIIMYSLDGKKWQTYRGNSTGTLMVFFGNVDSSGIKHNIFNPPIIARYIRLHPTHYSIRSTLRMELMGCDLNSCSMPLGMESKAISDAQITASSYFTNMFATWSPSKARLHLQGRSNAWRPQVNNPKEWLQVDFQKTMKVTGVTTQGVKSLLTSMYVKEFLISSSQDGHQWTLFFQNGKVKVFQGNQDSFTPVVNSLDPPLLTRYLRIHPQSWVHQIALRMEVLGCEAQDLYGPEGPSQSPRSFQGTSESATPESGPGSEPATSGSETPGTSESATPESGPGSEPATSGSETPGTSESATPESGPGTSTEPSEGSAPGSPAGSPTSTEEGTSESATPESGPGSEPATSGSETPGTSESATPESGPGSPAGSPTSTEEGSPAGSPTSTEEGTSTEPSEGSAPGTSESATPESGPGTSESATPESGPGTSESATPESGPGSEPATSGSETPGSEPATSGSETPGSPAGSPTSTEEGTSTEPSEGSAPGTSTEPSEGSAPGSEPATSGSETPGTSESATPESGPGTSTEPSEGSAP

SEQ ID NO: 1556 - protein, 2876 aa, synthetic construct
  REGION 1..2876: note = Description of Artificial Sequence: Synthetic polypeptide
MQIELSTCFFLCLLRFCFSGSPAGSPTSTEEGTSESATPESGPGTSTEPSEGSAPGSPAGSPTSTEEGTSTEPSEGSAPGTSTEPSEGSAPGTSESATPESGPGSEPATSGSETPGSEPATSGSETPGSPAGSPTSTEEGTSESATPESGPGTSTEPSEGSAPGTSTEPSEGSAPGSPAGSPTSTEEGTSTEPSEGSAPGTSTEPSEGSAPGTSESATPESGPGTSTEPSEGSAPGTSESATPESGPGSEPATSGSETPGTSTEPSEGSAPGTSTEPSEGSAPGTSESATPESGPGTSESATPESGPGSPAGSPTSTEEGTSESATPESGPGSEPATSGSETPGTSESATPESGPGTSTEPSEGSAPGTSTEPSEGSAPGTSTEPSEGSAPGTSTEPSEGSAPGTSTEPSEGSAPGTSTEPSEGSAPGSPAGSPTSTEEGTSTEPSEGSAPGTSESATPESGPGSEPATSGSETPGTSESATPESGPGSEPATSGSETPGTSESATPESGPGTSTEPSEGSAPGTSESATPESGPGSPAGSPTSTEEGSPAGSPTSTEEGSPAGSPTSTEEGTSESATPESGPGTSTEPSEGSAPQSPRSFQGPSGPATRRYYLGAVELSWDYMQSDLGELPVDARFPPRVPKSFPFNTSVVYKKTLFVEFTVHLFNIAKPRPPWMGLLGPTIQAEVYDTVVITLKNMASHPVSLHAVGVSYWKASEGAEYDDQTSQREKEDDKVFPGGSHTYVWQVLKENGPMASDPLCLTYSYLSHVDLVKDLNSGLIGALLVCREGSLAKEKTQTLHKFILLFAVFDEGKSWHSETKNSLMQDRDAASARAWPKMHTVNGYVNRSLPGLIGCHRKSVYWHVIGMGTTPEVHSIFLEGHTFLVRNHRQASLEISPITFLTAQTLLMDLGQFLLFCHISSHQHDGMEAYVKVDSCPEEPQLRMKNNEEAEDYDDDLTDSEMDVVRFDDDNSPSFIQIRSVAKKHPKTWVHYIAAEEEDWDYAPLVLAPDDRSYKSQYLNNGPQRIGRKYKKVRFMAYTDETFKTREAIQHESGILGPLLYGEVGDTLLIIFKNQASRPYNIYPHGITDVRPLYSRRLPKGVKHLKDFPILPGEIFKYKWTVTVEDGPTKSDPRCLTRYYSSFVNMERDLASGLIGPLLICYKESVDQRGNQIMSDKRNVILFSVFDENRSWYLTENIQRFLPNPAGVQLEDPEFQASNIMHSINGYVFDSLQLSVCLHEVAYWYILSIGAQTDFLSVFFSGYTFKHKMVYEDTLTLFPFSGETVFMSMENPGLWILGCHNSDFRNRGMTALLKVSSCDKNTGDYYEDSYEDISAYLLSKNNAIEPRSFSQNGSPAGSPTSTEEGTSESATPESGPGTSTEPSEGSAPGSPAGSPTSTEEGTSTEPSEGSAPGTSTEPSEGSAPGTSESATPESGPGSEPATSGSETPGSEPATSGSETPGSPAGSPTSTEEGTSESATPESGPGTSTEPSEGSAPGTSTEPSEGSAPGSPAGSPTSTEEGTSTEPSEGSAPGTSTEPSEGSAPGTSESATPESGPGTSTEPSEGSAPGTSESATPESGPGSEPATSGSETPGTSTEPSEGSAPGTSTEPSEGSAPGTSESATPESGPGTSESATPESGPGSPAGSPTSTEEGTSESATPESGPGSEPATSGSETPGTSESATPESGPGTSTEPSEGSAPGTSTEPSEGSAPGTSTEPSEGSAPGTSTEPSEGSAPGTSTEPSEGSAPGTSTEPSEGSAPGSPAGSPTSTEEGTSTEPSEGSAPGTSESATPESGPGSEPATSGSETPGTSESATPESGPGSEPATSGSETPGTSESATPESGPGTSTEPSEGSAPGTSESATPESGPGSPAGSPTSTEEGSPAGSPTSTEEGSPAGSPTSTEEGTSESATPESGPGTSTEPSEGSAPQSPRSFQKKTRHYFIAAVERLWDYGMSSSPHVLRNRAQSGSVPQFKKVVFQEFTDGSFTQPLYRGELNEHLGLLGPYIRAEVEDNIMVTFRNQASRPYSFYSSLISYEEDQRQGAEPRKNFVKPNETKTYFWKVQHHMAPTKDEFDCKAWAYFSDVDLEKDVHSGLIGPLLVCHTNTLNPAHGRQVTVQEFALFFTIFDETKSWYFTENMERNCRAPCNIQMEDPTFKENYRFHAINGYIMDTLPGLVMAQDQRIRWYLLSMGSNENIHSIHFSGHVFTVRKKEEYKMALYNLYPGVFETVEMLPSKAGIWRVECLIGEHLHAGMSTLFLVYSNKCQTPLGMASGHIRDFQITASGQYGQWAPKLARLHYSGSINAWSTKEPFSWIKVDLLAPMIIHGIKTQGARQKFSSLYISQFIIMYSLDGKKWQTYRGNSTGTLMVFFGNVDSSGIKHNIFNPPIIARYIRLHPTHYSIRSTLRMELMGCDLNSCSMPLGMESKAISDAQITASSYFTNMFATWSPSKARLHLQGRSNAWRPQVNNPKEWLQVDFQKTMKVTGVTTQGVKSLLTSMYVKEFLISSSQDGHQWTLFFQNGKVKVFQGNQDSFTPVVNSLDPPLLTRYLRIHPQSWVHQIALRMEVLGCEAQDLYGPEGPSQSPRSFQGTSESATPESGPGSEPATSGSETPGTSESATPESGPGSEPATSGSETPGTSESATPESGPGTSTEPSEGSAPGSPAGSPTSTEEGTSESATPESGPGSEPATSGSETPGTSESATPESGPGSPAGSPTSTEEGSPAGSPTSTEEGTSTEPSEGSAPGTSESATPESGPGTSESATPESGPGTSESATPESGPGSEPATSGSETPGSEPATSGSETPGSPAGSPTSTEEGTSTEPSEGSAPGTSTEPSEGSAPGSEPATSGSETPGTSESATPESGPGTSTEPSEGSAP

SEQ ID NO: 1557 - protein, 2576 aa, synthetic construct
  REGION 1..2576: note = Description of Artificial Sequence: Synthetic polypeptide
MQIELSTCFFLCLLRFCFSATRRYYLGAVELSWDYMQSDLGELPVDARFPPRVPKSFPFNTSVVYKKTLFVEFTVHLFNIAKPRPPWMGLLGPTIQAEVYDTVVITLKNMASHPVSLHAVGVSYWKASEGAEYDDQTSQREKEDDKVFPGGSHTYVWQVLKENGPMASDPLCLTYSYLSHVDLVKDLNSGLIGALLVCREGSLAKEKTQTLHKFILLFAVFDEGKSWHSETKNSLMQDRDAASARAWPKMHTVNGYVNRSLPGLIGCHRKSVYWHVIGMGTTPEVHSIFLEGHTFLVRNHRQASLEISPITFLTAQTLLMDLGQFLLFCHISSHQHDGMEAYVKVDSCPEEPQLRMKNNEEAEDYDDDLTDSEMDVVRFDDDNSPSFIQIRSVAKKHPKTWVHYIAAEEEDWDYAPLVLAPDDRSYKSQYLNNGPQRIGRKYKKVRFMAYTDETFKTREAIQHESGILGPLLYGEVGDTLLIIFKNQASRPYNIYPHGITDVRPLYSRRLPKGVKHLKDFPILPGEIFKYKWTVTVEDGPTKSDPRCLTRYYSSFVNMERDLASGLIGPLLICYKESVDQRGNQIMSDKRNVILFSVFDENRSWYLTENIQRFLPNPAGVQLEDPEFQASNIMHSINGYVFDSLQLSVCLHEVAYWYILSIGAQTDFLSVFFSGYTFKHKMVYEDTLTLFPFSGETVFMSMENPGLWILGCHNSDFRNRGMTALLKVSSCDKNTGDYYEDSYEDISAYLLSKNNAIEPRSFSQNGSPAGSPTSTEEGTSESATPESGPGTSTEPSEGSAPGSPAGSPTSTEEGTSTEPSEGSAPGTSTEPSEGSAPGTSESATPESGPGSEPATSGSETPGSEPATSGSETPGSPAGSPTSTEEGTSESATPESGPGTSTEPSEGSAPGTSTEPSEGSAPGSPAGSPTSTEEGTSTEPSEGSAPGTSTEPSEGSAPGTSESATPESGPGTSTEPSEGSAPGTSESATPESGPGSEPATSGSETPGTSTEPSEGSAPGTSTEPSEGSAPGTSESATPESGPGTSESATPESGPGSPAGSPTSTEEGTSESATPESGPGSEPATSGSETPGTSESATPESGPGTSTEPSEGSAPGTSTEPSEGSAPGTSTEPSEGSAPGTSTEPSEGSAPGTSTEPSEGSAPGTSTEPSEGSAPGSPAGSPTSTEEGTSTEPSEGSAPGTSESATPESGPGSEPATSGSETPGTSESATPESGPGSEPATSGSETPGTSESATPESGPGTSTEPSEGSAPGTSESATPESGPGSPAGSPTSTEEGSPAGSPTSTEEGSPAGSPTSTEEGTSESATPESGPGTSTEPSEGSAPQSPRSFQKKTRHYFIAAVERLWDYGMSSSPHVLRNRAQSGSVPQFKKVVFQEFTDGSFTQPLYRGELNEHLGLLGPYIRAEVEDNIMVTFRNQASRPYSFYSSLISYEEDQRQGAEPRKNFVKPNETKTYFWKVQHHMAPTKDEFDCKAWAYFSDVDLEKDVHSGLIGPLLVCHTNTLNPAHGRQVTVQEFALFFTIFDETKSWYFTENMERNCRAPCNIQMEDPTFKENYRFHAINGYIMDTLPGLVMAQDQRIRWYLLSMGSNENIHSIHFSGHVFTVRKKEEYKMALYNLYPGVFETVEMLPSKAGIWRVECLIGEHLHAGMSTLFLVYSNKCQTPLGMASGHIRDFQITASGQYGQWAPKLARLHYSGSINAWSTKEPFSWIKVDLLAPMIIHGIKTQGARQKFSSLYISQFIIMYSLDGKKWQTYRGNSTGTLMVFFGNVDSSGIKHNIFNPPIIARYIRLHPTHYSIRSTLRMELMGCDLNSCSMPLGMESKAISDAQITASSYFTNMFATWSPSKARLHLQGRSNAWRPQVNNPKEWLQVDFQKTMKVTGVTTQGVKSLLTSMYVKEFLISSSQDGHQWTLFFQNGKVKVFQGNQDSFTPVVNSLDPPLLTRYLRIHPQSWVHQIALRMEVLGCEAQDLYGPEGPSQSPRSFQGSPAGSPTSTEEGTSESATPESGPGTSTEPSEGSAPGSPAGSPTSTEEGTSTEPSEGSAPGTSTEPSEGSAPGTSESATPESGPGSEPATSGSETPGSEPATSGSETPGSPAGSPTSTEEGTSESATPESGPGTSTEPSEGSAPGTSTEPSEGSAPGSPAGSPTSTEEGTSTEPSEGSAPGTSTEPSEGSAPGTSESATPESGPGTSTEPSEGSAPGTSESATPESGPGSEPATSGSETPGTSTEPSEGSAPGTSTEPSEGSAPGTSESATPESGPGTSESATPESGPGSPAGSPTSTEEGTSESATPESGPGSEPATSGSETPGTSESATPESGPGTSTEPSEGSAPGTSTEPSEGSAPGTSTEPSEGSAPGTSTEPSEGSAPGTSTEPSEGSAPGTSTEPSEGSAPGSPAGSPTSTEEGTSTEPSEGSAPGTSESATPESGPGSEPATSGSETPGTSESATPESGPGSEPATSGSETPGTSESATPESGPGTSTEPSEGSAPGTSESATPESGPGSPAGSPTSTEEGSPAGSPTSTEEGSPAGSPTSTEEGTSESATPESGPGTSTEPSEGSAP

SEQ ID NO: 1558 - protein, 2576 aa, synthetic construct [sequence omitted]

SEQ ID NO: 1559 - protein, 2871 aa, synthetic construct [sequence omitted]

SEQ ID NO: 1560 - protein, 2583 aa, synthetic construct
  REGION 1..2583: note = Description of Artificial Sequence: Synthetic polypeptide
MQIELSTCFFLCLLRFCFSPGASPGTSSTGSPGASPGTSSTGSPGTPGSGTASSSPGSSTPSGATGSPGTPGSGTASSSPGSSTPSGATGSPGTPGSGTASSSPGSSTPSGATGSPGSSTPSGATGSPGSSPSASTGTGPGSSPSASTGTGPGASPGTSSTGSPGTPGSGTASSSPGSSTPSGATGSPGSSPSASTGTGPGSSPSASTGTGPGASPGTSSTGSPGASPGTSSTGSPGSSTPSGATGSPGSSPSASTGTGPGASPGTSSTGSPGSSPSASTGTGPGTPGSGTASSSPGSSTPSGATGSIEPRSPSGSPGATRRYYLGAVELSWDYMQSDLGELPVDARFPPRVPKSFPFNTSVVYKKTLFVEFTVHLFNIAKPRPPWMGLLGPTIQAEVYDTVVITLKNMASHPVSLHAVGVSYWKASEGAEYDDQTSQREKEDDKVFPGGSHTYVWQVLKENGPMASDPLCLTYSYLSHVDLVKDLNSGLIGALLVCREGSLAKEKTQTLHKFILLFAVFDEGKSWHSETKNSLMQDRDAASARAWPKMHTVNGYVNRSLPGLIGCHRKSVYWHVIGMGTTPEVHSIFLEGHTFLVRNHRQASLEISPITFLTAQTLLMDLGQFLLFCHISSHQHDGMEAYVKVDSCPEEPQLRMKNNEEAEDYDDDLTDSEMDVVRFDDDNSPSFIQIRSVAKKHPKTWVHYIAAEEEDWDYAPLVLAPDDRSYKSQYLNNGPQRIGRKYKKVRFMAYTDETFKTREAIQHESGILGPLLYGEVGDTLLIIFKNQASRPYNIYPHGITDVRPLYSRRLPKGVKHLKDFPILPGEIFKYKWTVTVEDGPTKSDPRCLTRYYSSFVNMERDLASGLIGPLLICYKESVDQRGNQIMSDKRNVILFSVFDENRSWYLTENIQRFLPNPAGVQLEDPEFQASNIMHSINGYVFDSLQLSVCLHEVAYWYILSIGAQTDFLSVFFSGYTFKHKMVYEDTLTLFPFSGETVFMSMENPGLWILGCHNSDFRNRGMTALLKVSSCDKNTGDYYEDSYEDISAYLLSKNNAIEPRSFSPGTPGSGTASSSPGSSTPSGATGSPGSSPSASTGTGPGSSPSASTGTGPGSSTPSGATGSPGSSTPSGATGSPGASPGTSSTGSPGASPGTSSTGSPGASPGTSSTGSPGTPGSGTASSSPGASPGTSSTGSPGASPGTSSTGSPGASPGTSSTGSPGSSPSASTGTGPGTPGSGTASSSPGASPGTSSTGSPGASPGTSSTGSPGASPGTSSTGSPGSSTPSGATGSPGSSTPSGATGSPGASPGTSSTGSPGTPGSGTASSSPGSSTPSGATGSPGSSTPSGATGSPGSSTPSGATGSPGSSPSASTGTGPGASPGTSSTGSPGASPGTSSTGSPGTPGSGTASSSPGASPGTSSTGSPGASPGTSSTGSPGASPGTSSTGSPGASPGTSSTGSPGTPGSGTASSSPGSSTPSGATGSPGTPGSGTASSSPGSSTPSGATGSPGTPGSGTASSSPGSSTPSGATGSPGSSTPSGATGSPGSSPSASTGTGPGSSPSASTGTGPGASPGTSSTGSPGTPGSGTASSSPGSSTPSGATGSPGSSPSASTGTGPGSSPSASTGTGPGASPGTSSTGSQSPRSFQKKTRHYFIAAVERLWDYGMSSSPHVLRNRAQSGSVPQFKKVVFQEFTDGSFTQPLYRGELNEHLGLLGPYIRAEVEDNIMVTFRNQASRPYSFYSSLISYEEDQRQGAEPRKNFVKPNETKTYFWKVQHHMAPTKDEFDCKAWAYFSDVDLEKDVHSGLIGPLLVCHTNTLNPAHGRQVTVQEFALFFTIFDETKSWYFTENMERNCRAPCNIQMEDPTFKENYRFHAINGYIMDTLPGLVMAQDQRIRWYLLSMGSNENIHSIHFSGHVFTVRKKEEYKMALYNLYPGVFETVEMLPSKAGIWRVECLIGEHLHAGMSTLFLVYSNKCQTPLGMASGHIRDFQITASGQYGQWAPKLARLHYSGSINAWSTKEPFSWIKVDLLAPMIIHGIKTQGARQKFSSLYISQFIIMYSLDGKKWQTYRGNSTGTLMVFFGNVDSSGIKHNIFNPPIIARYIRLHPTHYSIRSTLRMELMGCDLNSCSMPLGMESKAISDAQITASSYFTNMFATWSPSKARLHLQGRSNAWRPQVNNPKEWLQVDFQKTMKVTGVTTQGVKSLLTSMYVKEFLISSSQDGHQWTLFFQNGKVKVFQGNQDSFTPVVNSLDPPLLTRYLRIHPQSWVHQIALRMEVLGCEAQDLYGSPGQSPRSFQPGASPGTSSTGSPGASPGTSSTGSPGTPGSGTASSSPGSSTPSGATGSPGTPGSGTASSSPGSSTPSGATGSPGTPGSGTASSSPGSSTPSGATGSPGSSTPSGATGSPGSSPSASTGTGPGSSPSASTGTGPGASPGTSSTGSPGTPGSGTASSSPGSSTPSGATGSPGSSPSASTGTGPGSSPSASTGTGPGASPGTSSTGSPGASPGTSSTGSPGSSTPSGATGSPGSSPSASTGTGPGASPGTSSTGSPGSSPSASTGTGPGTPGSGTASSSPGSSTPSGATGS

SEQ ID NO: 1561 - protein, 2873 aa, synthetic construct [sequence omitted]

SEQ ID NO: 1562 - protein, 2572 aa, synthetic construct
  REGION 1..2572: note = Description of Artificial Sequence: Synthetic polypeptide
MQIELSTCFFLCLLRFCFSATRRYYLGAVELSWDYMQSDLGELPVDARFPPRVPKSFPFNTSVVYKKTLFVEFTVHLFNIAKPRPPWMGLLGPTIQAEVYDTVVITLKNMASHPVSLHAVGVSYWKASEGAEYDDQTSQREKEDDKVFPGGSHTYVWQVLKENGPMASDPLCLTYSYLSHVDLVKDLNSGLIGALLVCREGSLAKEKTQTLHKFILLFAVFDEGKSWHSETKNSLMQDRDAASARAWPKMHTVNGYVNRSLPGLIGCHRKSVYWHVIGMGTTPEVHSIFLEGHTFLVRNHRQASLEISPITFLTAQTLLMDLGQFLLFCHISSHQHDGMEAYVKVDSCPEEPQLRMKNNEEAEDYDDDLTDSEMDVVRFDDDNSPSFIQIRSVAKKHPKTWVHYIAAEEEDWDYAPLVLAPDDRSYKSQYLNNGPQRIGRKYKKVRFMAYTDETFKTREAIQHESGILGPLLYGEVGDTLLIIFKNQASRPYNIYPHGITDVRPLYSRRLPKGVKHLKDFPILPGEIFKYKWTVTVEDGPTKSDPRCLTRYYSSFVNMERDLASGLIGPLLICYKESVDQRGNQIMSDKRNVILFSVFDENRSWYLTENIQRFLPNPAGVQLEDPEFQASNIMHSINGYVFDSLQLSVCLHEVAYWYILSIGAQTDFLSVFFSGYTFKHKMVYEDTLTLFPFSGETVFMSMENPGLWILGCHNSDFRNRGMTALLKVSSCDKNTGDYYEDSYEDISAYLLSKNNAIEPRSFSPGTPGSGTASSSPGSSTPSGATGSPGSSPSASTGTGPGSSPSASTGTGPGSSTPSGATGSPGSSTPSGATGSPGASPGTSSTGSPGASPGTSSTGSPGASPGTSSTGSPGTPGSGTASSSPGASPGTSSTGSPGASPGTSSTGSPGASPGTSSTGSPGSSPSASTGTGPGTPGSGTASSSPGASPGTSSTGSPGASPGTSSTGSPGASPGTSSTGSPGSSTPSGATGSPGSSTPSGATGSPGASPGTSSTGSPGTPGSGTASSSPGSSTPSGATGSPGSSTPSGATGSPGSSTPSGATGSPGSSPSASTGTGPGASPGTSSTGSPGASPGTSSTGSPGTPGSGTASSSPGASPGTSSTGSPGASPGTSSTGSPGASPGTSSTGSPGASPGTSSTGSPGTPGSGTASSSPGSSTPSGATGSPGTPGSGTASSSPGSSTPSGATGSPGTPGSGTASSSPGSSTPSGATGSPGSSTPSGATGSPGSSPSASTGTGPGSSPSASTGTGPGASPGTSSTGSPGTPGSGTASSSPGSSTPSGATGSPGSSPSASTGTGPGSSPSASTGTGPGASPGTSSTGSQSPRSFQKKTRHYFIAAVERLWDYGMSSSPHVLRNRAQSGSVPQFKKVVFQEFTDGSFTQPLYRGELNEHLGLLGPYIRAEVEDNIMVTFRNQASRPYSFYSSLISYEEDQRQGAEPRKNFVKPNETKTYFWKVQHHMAPTKDEFDCKAWAYFSDVDLEKDVHSGLIGPLLVCHTNTLNPAHGRQVTVQEFALFFTIFDETKSWYFTENMERNCRAPCNIQMEDPTFKENYRFHAINGYIMDTLPGLVMAQDQRIRWYLLSMGSNENIHSIHFSGHVFTVRKKEEYKMALYNLYPGVFETVEMLPSKAGIWRVECLIGEHLHAGMSTLFLVYSNKCQTPLGMASGHIRDFQITASGQYGQWAPKLARLHYSGSINAWSTKEPFSWIKVDLLAPMIIHGIKTQGARQKFSSLYISQFIIMYSLDGKKWQTYRGNSTGTLMVFFGNVDSSGIKHNIFNPPIIARYIRLHPTHYSIRSTLRMELMGCDLNSCSMPLGMESKAISDAQITASSYFTNMFATWSPSKARLHLQGRSNAWRPQVNNPKEWLQVDFQKTMKVTGVTTQGVKSLLTSMYVKEFLISSSQDGHQWTLFFQNGKVKVFQGNQDSFTPVVNSLDPPLLTRYLRIHPQSWVHQIALRMEVLGCEAQDLYGSPGQSPRSFQPGTPGSGTASSSPGSSTPSGATGSPGSSPSASTGTGPGSSPSASTGTGPGSSTPSGATGSPGSSTPSGATGSPGASPGTSSTGSPGASPGTSSTGSPGASPGTSSTGSPGTPGSGTASSSPGASPGTSSTGSPGASPGTSSTGSPGASPGTSSTGSPGSSPSASTGTGPGTPGSGTASSSPGASPGTSSTGSPGASPGTSSTGSPGASPGTSSTGSPGSSTPSGATGSPGSSTPSGATGSPGASPGTSSTGSPGTPGSGTASSSPGSSTPSGATGSPGSSTPSGATGSPGSSTPSGATGSPGSSPSASTGTGPGASPGTSSTGSPGASPGTSSTGSPGTPGSGTASSSPGASPGTSSTGSPGASPGTSSTGSPGASPGTSSTGSPGASPGTSSTGSPGTPGSGTASSSPGSSTPSGATGSPGTPGSGTASSSPGSSTPSGATGSPGTPGSGTASSSPGSSTPSGATGSPGSSTPSGATGSPGSSPSASTGTGPGSSPSASTGTGPGASPGTSSTGSPGTPGSGTASSSPGSSTPSGATGSPGSSPSASTGTGPGSSPSASTGTGPGASPGTSSTGS

SEQ ID NO: 1563 - protein, 2297 aa, synthetic construct
  REGION 1..2297: note = Description of Artificial Sequence: Synthetic polypeptide
MQIELSTCFFLCLLRFCFSPGASPGTSSTGSPGASPGTSSTGSPGTPGSGTASSSPGSSTPSGATGSPGTPGSGTASSSPGSSTPSGATGSPGTPGSGTASSSPGSSTPSGATGSPGSSTPSGATGSPGSSPSASTGTGPGSSPSASTGTGPGASPGTSSTGSPGTPGSGTASSSPGSSTPSGATGSPGSSPSASTGTGPGSSPSASTGTGPGASPGTSSTGSPGASPGTSSTGSPGSSTPSGATGSPGSSPSASTGTGPGASPGTSSTGSPGSSPSASTGTGPGTPGSGTASSSPGSSTPSGATGSQSPRSFQGPSGPATRRYYLGAVELSWDYMQSDLGELPVDARFPPRVPKSFPFNTSVVYKKTLFVEFTVHLFNIAKPRPPWMGLLGPTIQAEVYDTVVITLKNMASHPVSLHAVGVSYWKASEGAEYDDQTSQREKEDDKVFPGGSHTYVWQVLKENGPMASDPLCLTYSYLSHVDLVKDLNSGLIGALLVCREGSLAKEKTQTLHKFILLFAVFDEGKSWHSETKNSLMQDRDAASARAWPKMHTVNGYVNRSLPGLIGCHRKSVYWHVIGMGTTPEVHSIFLEGHTFLVRNHRQASLEISPITFLTAQTLLMDLGQFLLFCHISSHQHDGMEAYVKVDSCPEEPQLRMKNNEEAEDYDDDLTDSEMDVVRFDDDNSPSFIQIRSVAKKHPKTWVHYIAAEEEDWDYAPLVLAPDDRSYKSQYLNNGPQRIGRKYKKVRFMAYTDETFKTREAIQHESGILGPLLYGEVGDTLLIIFKNQASRPYNIYPHGITDVRPLYSRRLPKGVKHLKDFPILPGEIFKYKWTVTVEDGPTKSDPRCLTRYYSSFVNMERDLASGLIGPLLICYKESVDQRGNQIMSDKRNVILFSVFDENRSWYLTENIQRFLPNPAGVQLEDPEFQASNIMHSINGYVFDSLQLSVCLHEVAYWYILSIGAQTDFLSVFFSGYTFKHKMVYEDTLTLFPFSGETVFMSMENPGLWILGCHNSDFRNRGMTALLKVSSCDKNTGDYYEDSYEDISAYLLSKNNAIEPRSFSPGASPGTSSTGSPGASPGTSSTGSPGTPGSGTASSSPGSSTPSGATGSPGTPGSGTASSSPGSSTPSGATGSPGTPGSGTASSSPGSSTPSGATGSPGSSTPSGATGSPGSSPSASTGTGPGSSPSASTGTGPGASPGTSSTGSPGTPGSGTASSSPGSSTPSGATGSPGSSPSASTGTGPGSSPSASTGTGPGASPGTSSTGSPGASPGTSSTGSPGSSTPSGATGSPGSSPSASTGTGPGASPGTSSTGSPGSSPSASTGTGPGTPGSGTASSSPGSSTPSGATGSQSPRSFQKKTRHYFIAAVERLWDYGMSSSPHVLRNRAQSGSVPQFKKVVFQEFTDGSFTQPLYRGELNEHLGLLGPYIRAEVEDNIMVTFRNQASRPYSFYSSLISYEEDQRQGAEPRKNFVKPNETKTYFWKVQHHMAPTKDEFDCKAWAYFSDVDLEKDVHSGLIGPLLVCHTNTLNPAHGRQVTVQEFALFFTIFDETKSWYFTENMERNCRAPCNIQMEDPTFKENYRFHAINGYIMDTLPGLVMAQDQRIRWYLLSMGSNENIHSIHFSGHVFTVRKKEEYKMALYNLYPGVFETVEMLPSKAGIWRVECLIGEHLHAGMSTLFLVYSNKCQTPLGMASGHIRDFQITASGQYGQWAPKLARLHYSGSINAWSTKEPFSWIKVDLLAPMIIHGIKTQGARQKFSSLYISQFIIMYSLDGKKWQTYRGNSTGTLMVFFGNVDSSGIKHNIFNPPIIARYIRLHPTHYSIRSTLRMELMGCDLNSCSMPLGMESKAISDAQITASSYFTNMFATWSPSKARLHLQGRSNAWRPQVNNPKEWLQVDFQKTMKVTGVTTQGVKSLLTSMYVKEFLISSSQDGHQWTLFFQNGKVKVFQGNQDSFTPVVNSLDPPLLTRYLRIHPQSWVHQIALRMEVLGCEAQDLYGPSGPQSPRSFQGTSESATPESGPGSEPATSGSETPGTSESATPESGPGSEPATSGSETPGTSESATPESGPGTSTEPSEGSAPGSPAGSPTSTEEGTSESATPESGPGSEPATSGSETPGTSESATPESGPGSPAGSPTSTEEGSPAGSPTSTEEGTSTEPSEGSAPGTSESATPESGPGTSESATPESGPGTSESATPESGPGSEPATSGSETPGSEPATSGSETPGSPAGSPTSTEEGTSTEPSEGSAPGTSTEPSEGSAPGSEPATSGSETPGTSESATPESGPGTSTEPSEGSAP

SEQ ID NO: 1564 - protein, 2572 aa, synthetic construct
  REGION 1..2572: note = Description of Artificial Sequence: Synthetic polypeptide
MQIELSTCFFLCLLRFCFSGSPAGSPTSTEEGTSESATPESGPGTSTEPSEGSAPGSPAGSPTSTEEGTSTEPSEGSAPGTSTEPSEGSAPGTSESATPESGPGSEPATSGSETPGSEPATSGSETPGSPAGSPTSTEEGTSESATPESGPGTSTEPSEGSAPGTSTEPSEGSAPGSPAGSPTSTEEGTSTEPSEGSAPGTSTEPSEGSAPGTSESATPESGPGTSTEPSEGSAPGTSESATPESGPGSEPATSGSETPGTSTEPSEGSAPGTSTEPSEGSAPGTSESATPESGPGTSESATPESGPGSPAGSPTSTEEGTSESATPESGPGSEPATSGSETPGTSESATPESGPGTSTEPSEGSAPGTSTEPSEGSAPGTSTEPSEGSAPGTSTEPSEGSAPGTSTEPSEGSAPGTSTEPSEGSAPGSPAGSPTSTEEGTSTEPSEGSAPGTSESATPESGPGSEPATSGSETPGTSESATPESGPGSEPATSGSETPGTSESATPESGPGTSTEPSEGSAPGTSESATPESGPGSPAGSPTSTEEGSPAGSPTSTEEGSPAGSPTSTEEGTSESATPESGPGTSTEPSEGSAPQSPRSFQGSPGATRRYYLGAVELSWDYMQSDLGELPVDARFPPRVPKSFPFNTSVVYKKTLFVEFTVHLFNIAKPRPPWMGLLGPTIQAEVYDTVVITLKNMASHPVSLHAVGVSYWKASEGAEYDDQTSQREKEDDKVFPGGSHTYVWQVLKENGPMASDPLCLTYSYLSHVDLVKDLNSGLIGALLVCREGSLAKEKTQTLHKFILLFAVFDEGKSWHSETKNSLMQDRDAASARAWPKMHTVNGYVNRSLPGLIGCHRKSVYWHVIGMGTTPEVHSIFLEGHTFLVRNHRQASLEISPITFLTAQTLLMDLGQFLLFCHISSHQHDGMEAYVKVDSCPEEPQLRMKNNEEAEDYDDDLTDSEMDVVRFDDDNSPSFIQIRSVAKKHPKTWVHYIAAEEEDWDYAPLVLAPDDRSYKSQYLNNGPQRIGRKYKKVRFMAYTDETFKTREAIQHESGILGPLLYGEVGDTLLIIFKNQASRPYNIYPHGITDVRPLYSRRLPKGVKHLKDFPILPGEIFKYKWTVTVEDGPTKSDPRCLTRYYSSFVNMERDLASGLIGPLLICYKESVDQRGNQIMSDKRNVILFSVFDENRSWYLTENIQRFLPNPAGVQLEDPEFQASNIMHSINGYVFDSLQLSVCLHEVAYWYILSIGAQTDFLSVFFSGYTFKHKMVYEDTLTLFPFSGETVFMSMENPGLWILGCHNSDFRNRGMTALLKVSSCDKNTGDYYEDSYEDISAYLLSKNNAIEPRSFSPGTPGSGTASSSPGSSTPSGATGSPGSSPSASTGTGPGSSPSASTGTGPGSSTPSGATGSPGSSTPSGATGSPGASPGTSSTGSPGASPGTSSTGSPGASPGTSSTGSPGTPGSGTASSSPGASPGTSSTGSPGASPGTSSTGSPGASPGTSSTGSPGSSPSASTGTGPGTPGSGTASSSPGASPGTSSTGSPGASPGTSSTGSPGASPGTSSTGSPGSSTPSGATGSPGSSTPSGATGSPGASPGTSSTGSPGTPGSGTASSSPGSSTPSGATGSPGSSTPSGATGSPGSSTPSGATGSPGSSPSASTGTGPGASPGTSSTGSPGASPGTSSTGSPGTPGSGTASSSPGASPGTSSTGSPGASPGTSSTGSPGASPGTSSTGSPGASPGTSSTGSPGTPGSGTASSSPGSSTPSGATGSPGTPGSGTASSSPGSSTPSGATGSPGTPGSGTASSSPGSSTPSGATGSPGSSTPSGATGSPGSSPSASTGTGPGSSPSASTGTGPGASPGTSSTGSPGTPGSGTASSSPGSSTPSGATGSPGSSPSASTGTGPGSSPSASTGTGPGASPGTSSTGSQSPRSFQKKTRHYFIAAVERLWDYGMSSSPHVLRNRAQSGSVPQFKKVVFQEFTDGSFTQPLYRGELNEHLGLLGPYIRAEVEDNIMVTFRNQASRPYSFYSSLISYEEDQRQGAEPRKNFVKPNETKTYFWKVQHHMAPTKDEFDCKAWAYFSDVDLEKDVHSGLIGPLLVCHTNTLNPAHGRQVTVQEFALFFTIFDETKSWYFTENMERNCRAPCNIQMEDPTFKENYRFHAINGYIMDTLPGLVMAQDQRIRWYLLSMGSNENIHSIHFSGHVFTVRKKEEYKMALYNLYPGVFETVEMLPSKAGIWRVECLIGEHLHAGMSTLFLVYSNKCQTPLGMASGHIRDFQITASGQYGQWAPKLARLHYSGSINAWSTKEPFSWIKVDLLAPMIIHGIKTQGARQKFSSLYISQFIIMYSLDGKKWQTYRGNSTGTLMVFFGNVDSSGIKHNIFNPPIIARYIRLHPTHYSIRSTLRMELMGCDLNSCSMPLGMESKAISDAQITASSYFTNMFATWSPSKARLHLQGRSNAWRPQVNNPKEWLQVDFQKTMKVTGVTTQGVKSLLTSMYVKEFLISSSQDGHQWTLFFQNGKVKVFQGNQDSFTPVVNSLDPPLLTRYLRIHPQSWVHQIALRMEVLGCEAQDLY

SEQ ID NO: 1565 - protein, 2360 aa, synthetic construct
  REGION 1..2360: note = Description of Artificial Sequence: Synthetic polypeptide
ATRRYYLGAVELSWDYMQSDLGELPVDARFPPRVPKSFPFNTSVVYKKTLFVEFTVHLFNIAKPRPPWMGLLGPTIQAEVYDTVVITLKNMASHPVSLHAVGVSYWKASEGAEYDDQTSQREKEDDKVFPGGSHTYVWQVLKENGPMASDPLCLTYSYLSHVDLVKDLNSGLIGALLVCREGSLAKEKTQTLHKFILLFAVFDEGKSWHSETKNSLMQDRDAASARAWPKMHTVNGYVNSSLPGLIGCHRKSVYWHVIGMGTTPEVHSIFLEGHTFLVRNHRQASLEISPITFLTAQTLLMDLGQFLLFCHISSHQHDGMEAYVKVDSCPEEPQLRMKNNEEAEDYDDDLTDSEMDVVRFDDDNSPSKLTRAETGEPSEGSAPGSPAGSPTSTEEGTSESATPESGPGSEPATSGSGFIQIRSVAKKHPKTWVHYIAAEEEDWDYAPLVLAPDDRSYKSQYLNNGPQRIGRKYKKVRFMAYTDETFKTREAIQHESGILGPLLYGEVGDTLLIIFKNQASRPYNIYPHGITDVRPLYSRRLPKGVKHLKDFPILPGEIFKYKWTVTVEDGPTKSDPRCLTRYYSSFVNMERDLASGLIGPLLICYKESVDQRGNQIMSDKRNVILFSVFDENRSWYLTENIQRFLPNPAGVQLEDPEFQASNIMHSINGYVFDSLQLSVCLHEVAYWYILSIGAQTDFLSVFFSGYTFKHKMVYEDTLTLFPFSGETVFMSMENPGLWILGCHNSDFRNRGMTALLKVSSCDKNTGDYYEDSYEDISAYLLSKNNAIEPRSFSQNPPVLKRHQREITRTTLQSDQEEIDYDDTISVEMKKEDFDIYDEDENQSPRSFQKKTRHYFIAAVERLWDYGMSSSPHVLRNRAQSGSVPQFKKVVFQEFTDGSFTQPLYRGELNEHLGLLGPYIRAEVEDNIMVTFRNQASRPYSFYSSLISYEEDQRQGAEPRKNFVKPNETKTYFWKVQHHMAPTKDEFDCKAWAYFSDVDLEKDVHSGLIGPLLVCHTNTLNPAHGRQVTVQEFALFFTIFDETKSWYFTENMERNCRAPCNIQMEDPTFKENYRFHAINGYIMDTLPGLVMAQDQRIRWYLLSMGSNENIHSIHFSGHVFTVRKKEEYKMALYNLYPGVFETVEMLPSKAGIWRVECLIGEHLHAGMSTLFLVYSNKCQTPLGMASGHIRDFQITASGQYGQWAPKLARLHYSGSINAWSTKEPFSWIKVDLLAPMIIHGIKTQGARQKFSSLYISQFIIMYSLDGKKWQTYRGNSTGTLMVFFGNVDSSGIKHNIFNPPIIARYIRLHPTHYSIRSTLRMELMGCDLNSCSMPLGMESKAISDAQITASSYFTNMFATWTPSKARLHLQGRSNAWRPQVNNPKEWLQVDFQKTMKVTGVTTQGVKSLLTSMYVKEFLISSSQDGHQWTLFFQNGKVKVFQGNQDSFTPVVNSLDPPLLTRYLRIHPQSWVHQIALRMEVLGCEAQDLYKLTRAETGGSPAGSPTSTEEGTSESATPESGPGTSTEPSEGSAPGSPAGSPTSTEEGTSTEPSEGSAPGTSTEPSEGSAPGTSESATPESGPGSEPATSGSETPGSEPATSGSETPGSPAGSPTSTEEGTSESATPESGPGTSTEPSEGSAPGTSTEPSEGSAPGSPAGSPTSTEEGTSTEPSEGSAPGTSTEPSEGSAPGTSESATPESGPGTSTEPSEGSAPGTSESATPESGPGSEPATSGSETPGTSTEPSEGSAPGTSTEPSEGSAPGTSESATPESGPGTSESATPESGPGSPAGSPTSTEEGTSESATPESGPGSEPATSGSETPGTSESATPESGPGTSTEPSEGSAPGTSTEPSEGSAPGTSTEPSEGSAPGTSTEPSEGSAPGTSTEPSEGSAPGTSTEPSEGSAPGSPAGSPTSTEEGTSTEPSEGSAPGTSESATPESGPGSEPATSGSETPGTSESATPESGPGSEPATSGSETPGTSESATPESGPGTSTEPSEGSAPGTSESATPESGPGSPAGSPTSTEEGSPAGSPTSTEEGSPAGSPTSTEEGTSESATPESGPGTSTEPSEGSAPGTSESATPESGPGSEPATSGSETPGTSESATPESGPGSEPATSGSETPGTSESATPESGPGTSTEPSEGSAPGSPAGSPTSTEEGTSESATPESGPGSEPATSGSETPGTSESATPESGPGSPAGSPTSTEEGSPAGSPTSTEEGTSTEPSEGSAPGTSESATPESGPGTSESATPESGPGTSESATPESGPGSEPATSGSETPGSEPATSGSETPGSPAGSPTSTEEGTSTEPSEGSAPGTSTEPSEGSAPGSEPATSGSETPGTSESATPESGPGTSTEPSEGSAP

SEQ ID NO: 1566 - protein, 2615 aa, synthetic construct
  REGION 1..2615: note = Description of Artificial Sequence: Synthetic polypeptide
ATRRYYLGAVELSWDYMQSDLGELPVDARFPPRVPKSFPFNTSVVYKKTLFVEFTVHLFNIAKPRPPWMGLLGPTIQAEVYDTVVITLKNMASHPVSLHAVGVSYWKASEGAEYDDQTSQREKEDDKVFPGGSHTYVWQVLKENGPMASDPLCLTYSYLSHVDLVKDLNSGLIGALLVCREGSLAKEKTQTLHKFILLFAVFDEGKSWHSETKNSLMQDRDAASARAWPKMHTVNGYVNRSLPGLIGCHRKSVYWHVIGMGTTPEVHSIFLEGHTFLVRNHRQASLEISPITFLTAQTLLMDLGQFLLFCHISSHQHDGMEAYVKVDSCPEEPQLRMKNNEEAEDYDDDLTDSEMDVVRFDDDNSPSFIQIRSVAKKHPKTWVHYIAAEEEDWDYAPLVLAPDDRSYKSQYLNNGPQRIGRKYKKVRFMAYTDETFKTREAIQHESGILGPLLYGEVGDTLLIIFKNQASRPYNIYPHGITDVRPLYSRRLPKGVKHLKDFPILPGEIFKYKWTVTVEDGPTKSDPRCLTRYYSSFVNMERDLASGLIGPLLICYKESVDQRGNQIMSDKRNVILFSVFDENRSWYLTENIQRFLPNPAGVQLEDPEFQASNIMHSINGYVFDSLQLSVCLHEVAYWYILSIGAQTDFLSVFFSGYTFKHKMVYEDTLTLFPFSGETVFMSMENPGLWILGCHNSDFRNRGMTALLKVSSCDKNTGDYYEDSYEDISAYLLSKNNAIEPRSFSQNPLGRIVGGPGASPGTSSTGSPGASPGTSSTGSPGTPGSGTASSSPGSSTPSGATGSPGTPGSGTASSSPGSSTPSGATGSPGTPGSGTASSSPGSSTPSGATGSPGSSTPSGATGSPGSSPSASTGTGPGSSPSASTGTGPGASPGTSSTGSPGTPGSGTASSSPGSSTPSGATGSPGSSPSASTGTGPGSSPSASTGTGPGASPGTSSTGSPGASPGTSSTGSPGSSTPSGATGSPGSSPSASTGTGPGASPGTSSTGSPGSSPSASTGTGPGTPGSGTASSSPGSSTPSGATGSGPLGRIVGGPPVLKRHQREITRTTLQSDQEEIDYDDTISVEMKKEDFDIYDEDENQSPRSFQKKTRHYFIAAVERLWDYGMSSSPHVLRNRAQSGSVPQFKKVVFQEFTDGSFTQPLYRGELNEHLGLLGPYIRAEVEDNIMVTFRNQASRPYSFYSSLISYEEDQRQGAEPRKNFVKPNETKTYFWKVQHHMAPTKDEFDCKAWAYFSDVDLEKDVHSGLIGPLLVCHTNTLNPAHGRQVTVQEFALFFTIFDETKSWYFTENMERNCRAPCNIQMEDPTFKENYRFHAINGYIMDTLPGLVMAQDQRIRWYLLSMGSNENIHSIHFSGHVFTVRKKEEYKMALYNLYPGVFETVEMLPSKAGIWRVECLIGEHLHAGMSTLFLVYSNKCQTPLGMASGHIRDFQITASGQYGQWAPKLARLHYSGSINAWSTKEPFSWIKVDLLAPMIIHGIKTQGARQKFSSLYISQFIIMYSLDGKKWQTYRGNSTGTLMVFFGNVDSSGIKHNIFNPPIIARYIRLHPTHYSIRSTLRMELMGCDLNSCSMPLGMESKAISDAQITASSYFTNMFATWSPSKARLHLQGRSNAWRPQVNNPKEWLQVDFQKTMKVTGVTTQGVKSLLTSMYVKEFLISSSQDGHQWTLFFQNGKVKVFQGNQDSFTPVVNSLDPPLLTRYLRIHPQSWVHQIALRMEVLGCEAQDLYPLGRIVGGGASPGTSSTGSPGSSPSASTGTGPGSSPSASTGTGPGTPGSGTASSSPGSSTPSGATGSPGSSPSASTGTGPGASPGTSSTGSPGTPGSGTASSSPGSSTPSGATGSPGTPGSGTASSSPGASPGTSSTGSPGASPGTSSTGSPGTPGSGTASSSPGSSTPSGATGSPGASPGTSSTGSPGTPGSGTASSSPGSSTPSGATGSPGSSPSASTGTGPGSSPSASTGTGPGSSTPSGATGSPGSSTPSGATGSPGASPGTSSTGSPGASPGTSSTGSPGASPGTSSTGSPGTPGSGTASSSPGASPGTSSTGSPGASPGTSSTGSPGASPGTSSTGSPGSSPSASTGTGPGTPGSGTASSSPGASPGTSSTGSPGASPGTSSTGSPGASPGTSSTGSPGSSTPSGATGSPGSSTPSGATGSPGASPGTSSTGSPGTPGSGTASSSPGSSTPSGATGSPGSSTPSGATGSPGSSTPSGATGSPGSSPSASTGTGPGASPGTSSTGSPGASPGTSSTGSPGTPGSGTASSSPGASPGTSSTGSPGASPGTSSTGSPGASPGTSSTGSPGASPGTSSTGSPGTPGSGTASSSPGSSTPSGATGSPGTPGSGTASSSPGSSTPSGATGSPGTPGSGTASSSPGSSTPSGATGSPGSSTPSGATGSPGSSPSASTGTGPGSSPSASTGTGPGASPGTSSTGSPGTPGSGTASSSPGSSTPSGATGSPGSSPSASTGTGPGSSPSASTGTGPGASPGTSSTGSPGASPGTSSTGSPGSSTPSGATGSPGSSPSASTGTGPGASPGTSSTGSPGSSPSASTGTGPGTPGSGTASSSPGSSTPSGATGSPGSSTPSGATGSPGASPGTSSTGSP

SEQ ID NO: 1567 - protein, 2242 aa, synthetic construct
  REGION 1..2242: note = Description of Artificial Sequence: Synthetic polypeptide
ATRRYYLGAVELSWDYMQSDLGELPVDARFPPRVPKSFPFNTSVVYKKTLFVEFTVHLFNIAKPRPPWMGLLGPTIQAEVYDTVVITLKNMASHPVSLHAVGVSYWKASEGAEYDDQTSQREKEDDKVLQVRIVGGGAPSPSASTGTGPGTPGSGTASSSPGSSTPSGATGSPGPSGPGLQVRIVGGFPGGSHTYVWQVLKENGPMASDPLCLTYSYLSHVDLVKDLNSGLIGALLVCREGSLAKEKTQTLHKFILLFAVFDEGKSWHSETKNSLMQDRDAASARAWPKMHTVNGYVNRSLPGLIGCHRKSVYWHVIGMGTTPEVHSIFLEGHTFLVRNHRQASLEISPITFLTAQTLLMDLGQFLLFCHISSHQHDGMEAYVKVDSCPEEPQLRMKNNEEAEDYDDDLTDSEMDVVRFDDDNSPSFIQIRSVAKKHPKTWVHYIAAEEEDWDYAPLVLAPDDRSYKSQYLNNGPQRIGRKYKKVRFMAYTDETFKTREAIQHESGILGPLLYGEVGDTLLIIFKNQASRPYNIYPHGITDVRPLYSRRLPKGVKHLKDFPILPGEIFKYKWTVTVEDGPTKSDPRCLTRYYSSFVNMERDLASGLIGPLLICYKESVDQRGNQIMSDKRNVILFSVFDENRSWYLTENIQRFLPNPAGVQLEDPEFQASNIMHSINGYVFDSLQLSVCLHEVAYWYILSIGAQTDFLSVFFSGYTFKHKMVYEDTLTLFPFSGETVFMSMENPGLWILGCHNSDFRNRGMTALLKVSSCDKNTGDYYEDSYEDISAYLLSKNNAIEPRSFSQNPPVLKRHQREITRTTLQSDQEEIDYDDTISVEMKKEDFDIYDEDENQSPRSFQKKTRHYFIAAVERLWDYGMSSSPHVLRNRAQSGSVPQFKKVVFQEFTDGSFTQPLYRGELNEHLGLLGPYIRAEVEDNIMVTFRNQASRPYSFYSSLISYEEDQRQGAEPRKNFVKPNETKTYFWKVQHHMAPTKDEFDCKAWAYFSDVDLEKDVHSGLIGPLLVCHTNTLNPAHGRQVTVQEFALFFTIFDETKSWYFTENMERNCRAPCNIQMEDPTFKENYRFHAINGYIMDTLPGLVMAQDQRIRWYLLSMGSNENIHSIHFSGHVFTVRKKEEYKMALYNLYPGVFETVEMLPSKAGIWRVECLIGEHLHAGMSTLFLVYSNKCQTPLGMASGHIRDFQITASGQYGLQVRIVGGSGTASSSPGSSTPSGATGSPGTPGSGTASSSPGSSTPSGATGSPGSSTPSGATGSPGSSPSASTGTGPGSSPSASTGTGPGASPGTSSTGSPGTPGSGTASSSPGSSTPSGATGSPGSSPSASTGTGPGSSPSASTGTGPGASPGLQVRIVGGQWAPKLARLHYSGSINAWSTKEPFSWIKVDLLAPMIIHGIKTQGARQKFSSLYISQFIIMYSLDGKKWQTYRGNSTGTLMVFFGNVDSSGIKHNIFNPPIIARYIRLHPTHYSIRSTLRMELMGCDLNSCSMPLGMESKAISDAQITASSYFTNMFATWSPSKARLHLQGRSNAWRPQVNNPKEWLQVDFQKTMKVTGVTTQGVKSLLTSMYVKEFLISSSQDGHQWTLFFQNGKVKVFQGNQDSFTPVVNSLDPPLLTRYLRIHPQSWVHQIALRMEVLGCEAQDLYLQVRIVGGPGTPGSGTASSSPGSSTPSGATGSPGSSPSASTGTGPGSSPSASTGTGPGSSTPSGATGSPGSSTPSGATGSPGASPGTSSTGSPGASPGTSSTGSPGASPGTSSTGSPGTPGSGTASSSPGASPGTSSTGSPGASPGTSSTGSPGASPGTSSTGSPGSSPSASTGTGPGTPGSGTASSSPGASPGTSSTGSPGASPGTSSTGSPGASPGTSSTGSPGSSTPSGATGSPGSSTPSGATGSPGASPGTSSTGSPGTPGSGTASSSPGSSTPSGATGSPGSSTPSGATGSPGSSTPSGATGSPGSSPSASTGTGPGASPGTSSTGSPGASPGTSSTGSPGTPGSGTASSSPGASPGTSSTGSPGASPGTSSTGSPGASPGTSSTGSPGASPGTSSTGSPGTPGSGTASSSPGSSTPSGATGSPGTPGSGTASSSPGSSTPSGATGSPGTPGSGTASSSPGSSTPSGATGSPGSSTPSGATGSPGSSPSASTGTGPGSSPSASTGTGPGASPGTSSTGSPGTPGSGTASSSPGSSTPSGATGSPGSSPSASTGTGPGSSPSASTGTGPGASPGTSSTGS

SEQ ID NO: 1568 - protein, 3351 aa, synthetic construct [sequence omitted]

SEQ ID NO: 1569 - protein, 1592 aa, synthetic construct
  REGION 1..1592: note = Description of Artificial Sequence: Synthetic polypeptide
ATRRYYLGAVELSWDYMQSDLGELPVDARFPPRVPKSFPFNTSVVYKKTLFVEFTVHLFNIAKPRPPWMGLLGPTIQAEVYDTVVITLKNMASHPVSLHAVGVSYWKASEGAEYDDQTSQREKEDDKVFPGGSHTYVWQVLKENGPMASDPLCLTYSYLSHVDLVKDLNSGLIGALLVCREGSLAKEKTQTLHKFILLFAVFDEGKSWHSETKNSLMQDRDAASARAWPKMHTVNGYVNRSLPGLIGCHRKSVYWHVIGMGTTPEVHSIFLEGHTFLVRNHRQASLEISPITFLTAQTLLMDLGQFLLFCHISSHQHDGMEAYVKVDSCPEEPQLRMKNNEEAEDYDDDLTDSEMDVVRFDDDNSPSFIQIRSVAKKHPKTWVHYIAAEEEDWDYAPLVLAPDDRSYKSQYLNNGPQRIGRKYKKVRFMAYTDETFKTREAIQHESGILGPLLYGEVGDTLLIIFKNQASRPYNIYPHGITDVRPLYSRRLPKGVKHLKDFPILPGEIFKYKWTVTVEDGPTKSDPRCLTRYYSSFVNMERDLASGLIGPLLICYKESVDQRGNQIMSDKRNVILFSVFDENRSWYLTENIQRFLPNPAGVQLEDPEFQASNIMHSINGYVFDSLQLSVCLHEVAYWYILSIGAQTDFLSVFFSGYTFKHKMVYEDTLTLFPFSGETVFMSMENPGLWILGCHNSDFRNRGMTALLKVSSCDKNTGDYYEDSYEDISAYLLSKNNAIEPRSFSQNPPVLKRHQGEITRTTLQSDQEEIDYDDTISVEMKKEDFDIYDEDENQSPRSFQKKTRHYFIAAVERLWDYGMSSSPHVLRNRAQSGSVPQFKKVVFQEFTDGSFTQPLYRGELNEHLGLLGPYIRAEVEDNIMVTFRNQASRPYSFYSSLISYEEDQRQGAEPRKNFVKPNETKTYFWKVQHHMAPTKDEFDCKAWAYFSDVDLEKDVHSGLIGPLLVCHTNTLNPAHGRQVTVQEFALFFTIFDETKSWYFTENMERNCRAPCNIQMEDPTFKENYRFHAINGYIMDTLPGLVMAQDQRIRWYLLSMGSNENIHSIHFSGHVFTVRKKEEYKMALYNLYPGVFETVEMLPSKAGIWRVECLIGEHLHAGMSTLFLVYSNKCQTPLGMASGHIRDFQITASGQYGQWAPKLARLHYSGSINAWSTKEPFSWIKVDLLAPMIIHGIKTQGARQKFSSLYISQFIIMYSLDGKKWQTYRGNSTGTLMVFFGNVDSSGIKHNIFNPPIIARYIRLHPTHYSIRSTLRMELMGCDLNSCSMPLGMESKAISDAQITASSYFTNMFATWSPSKARLHLQGRSNAWRPQVNNPKEWLQVDFQKTMKVTGVTTQGVKSLLTSMYVKEFLISSSQDGHQWTLFFQNGKVKVFQGNQDSFTPVVNSLDPPLLTRYLRIHPQSWVHQIALRMEVLGCEAQDLYGTMTRIVGGGGSEPATSGSETPGTSESATPESGPGSEPATSGSETPGSPAGSPTSTEEGTSTEPSEGSAPGSEPATSGSETPGSEPATSGSETPGSEPATSGSETPGTSTEPSEGSAPGTSESATPESGPGSEPATSGSETPGTSTEPSEGSAP

SEQ ID NO: 1570 - protein, 1584 aa, synthetic construct
  REGION 1..1584: note = Description of Artificial Sequence: Synthetic polypeptide
ATRRYYLGAVELSWDYMQSDLGELPVDARFPPRVPKSFPFNTSVVYKKTLFVEFTVHLFNIAKPRPPWMGLLGPTIQAEVYDTVVITLKNMASHPVSLHAVGVSYWKASEGAEYDDQTSQREKEDDKVFPGGSHTYVWQVLKENGPMASDPLCLTYSYLSHVDLVKDLNSGLIGALLVCREGSLAKEKTQTLHKFILLFAVFDEGKSWHSETKNSLMQDRDAASARAWPKMHTVNGYVNRSLPGLIGCHRKSVYWHVIGMGTTPEVHSIFLEGHTFLVRNHRQASLEISPITFLTAQTLLMDLGQFLLFCHISSHQHDGMEAYVKVDSCPEEPQLRMKNNEEAEDYDDDLTDSEMDVVRFDDDNSPSFIQIRSVAKKHPKTWVHYIAAEEEDWDYAPLVLAPDDRSYKSQYLNNGPQRIGRKYKKVRFMAYTDETFKTREAIQHESGILGPLLYGEVGDTLLIIFKNQASRPYNIYPHGITDVRPLYSRRLPKGVKHLKDFPILPGEIFKYKWTVTVEDGPTKSDPRCLTRYYSSFVNMERDLASGLIGPLLICYKESVDQRGNQIMSDKRNVILFSVFDENRSWYLTENIQRFLPNPAGVQLEDPEFQASNIMHSINGYVFDSLQLSVCLHEVAYWYILSIGAQTDFLSVFFSGYTFKHKMVYEDTLTLFPFSGETVFMSMENPGLWILGCHNSDFRNRGMTALLKVSSCDKNTGDYYEDSYEDISAYLLSKNNAIEPRSFSQNPPVLKRHQGEITRTTLQSDQEEIDYDDTISVEMKKEDFDIYDEDENQSPRSFQKKTRHYFIAAVERLWDYGMSSSPHVLRNRAQSGSVPQFKKVVFQEFTDGSFTQPLYRGELNEHLGLLGPYIRAEVEDNIMVTFRNQASRPYSFYSSLISYEEDQRQGAEPRKNFVKPNETKTYFWKVQHHMAPTKDEFDCKAWAYFSDVDLEKDVHSGLIGPLLVCHTNTLNPAHGRQVTVQEFALFFTIFDETKSWYFTENMERNCRAPCNIQMEDPTFKENYRFHAINGYIMDTLPGLVMAQDQRIRWYLLSMGSNENIHSIHFSGHVFTVRKKEEYKMALYNLYPGVFETVEMLPSKAGIWRVECLIGEHLHAGMSTLFLVYSNKCQTPLGMASGHIRDFQITASGQYGQWAPKLARLHYSGSINAWSTKEPFSWIKVDLLAPMIIHGIKTQGARQKFSSLYISQFIIMYSLDGKKWQTYRGNSTGTLMVFFGNVDSSGIKHNIFNPPIIARYIRLHPTHYSIRSTLRMELMGCDLNSCSMPLGMESKAISDAQITASSYFTNMFATWSPSKARLHLQGRSNAWRPQVNNPKEWLQVDFQKTMKVTGVTTQGVKSLLTSMYVKEFLISSSQDGHQWTLFFQNGKVKVFQGNQDSFTPVVNSLDPPLLTRYLRIHPQSWVHQIALRMEVLGCEAQDLYGGGSEPATSGSETPGTSESATPESGPGSEPATSGSETPGSPAGSPTSTEEGTSTEPSEGSAPGSEPATSGSETPGSEPATSGSETPGSEPATSGSETPGTSTEPSEGSAPGTSESATPESGPGSEPATSGSETPGTSTEPSEGSAP

SEQ ID NO: 1571 - protein, 1591 aa, synthetic construct
  REGION 1..1591: note = Description of Artificial Sequence: Synthetic polypeptide
ATRRYYLGAVELSWDYMQSDLGELPVDARFPPRVPKSFPFNTSVVYKKTLFVEFTVHLFNIAKPRPPWMGLLGPTIQAEVYDTVVITLKNMASHPVSLHAVGVSYWKASEGAEYDDQTSQREKEDDKVFPGGSHTYVWQVLKENGPMASDPLCLTYSYLSHVDLVKDLNSGLIGALLVCREGSLAKEKTQTLHKFILLFAVFDEGKSWHSETKNSLMQDRDAASARAWPKMHTVNGYVNRSLPGLIGCHRKSVYWHVIGMGTTPEVHSIFLEGHTFLVRNHRQASLEISPITFLTAQTLLMDLGQFLLFCHISSHQHDGMEAYVKVDSCPEEPQLRMKNNEEAEDYDDDLTDSEMDVVRFDDDNSPSFIQIRSVAKKHPKTWVHYIAAEEEDWDYAPLVLAPDDRSYKSQYLNNGPQRIGRKYKKVRFMAYTDETFKTREAIQHESGILGPLLYGEVGDTLLIIFKNQASRPYNIYPHGITDVRPLYSRRLPKGVKHLKDFPILPGEIFKYKWTVTVEDGPTKSDPRCLTRYYSSFVNMERDLASGLIGPLLICYKESVDQRGNQIMSDKRNVILFSVFDENRSWYLTENIQRFLPNPAGVQLEDPEFQASNIMHSINGYVFDSLQLSVCLHEVAYWYILSIGAQTDFLSVFFSGYTFKHKMVYEDTLTLFPFSGETVFMSMENPGLWILGCHNSDFRNRGMTALLKVSSCDKNTGDYYEDSYEDISAYLLSKNNAIEPRSFSQNPPVLKRHQGEITRTTLQSDQEEIDYDDTISVEMKKEDFDIYDEDENQSPRSFQKKTRHYFIAAVERLWDYGMSSSPHVLRNRAQSGSVPQFKKVVFQEFTDGSFTQPLYRGELNEHLGLLGPYIRAEVEDNIMVTFRNQASRPYSFYSSLISYEEDQRQGAEPRKNFVKPNETKTYFWKVQHHMAPTKDEFDCKAWAYFSDVDLEKDVHSGLIGPLLVCHTNTLNPAHGRQVTVQEFALFFTIFDETKSWYFTENMERNCRAPCNIQMEDPTFKENYRFHAINGYIMDTLPGLVMAQDQRIRWYLLSMGSNENIHSIHFSGHVFTVRKKEEYKMALYNLYPGVFETVEMLPSKAGIWRVECLIGEHLHAGMSTLFLVYSNKCQTPLGMASGHIRDFQITASGQYGQWAPKLARLHYSGSINAWSTKEPFSWIKVDLLAPMIIHGIKTQGARQKFSSLYISQFIIMYSLDGKKWQTYRGNSTGTLMVFFGNVDSSGIKHNIFNPPIIARYIRLHPTHYSIRSTLRMELMGCDLNSCSMPLGMESKAISDAQITASSYFTNMFATWSPSKARLHLQGRSNAWRPQVNNPKEWLQVDFQKTMKVTGVTTQGVKSLLTSMYVKEFLISSSQDGHQWTLFFQNGKVKVFQGNQDSFTPVVNSLDPPLLTRYLRIHPQSWVHQIALRMEVLGCEAQDLYGKLTRAETGGSEPATSGSETPGTSESATPESGPGSEPATSGSETPGSPAGSPTSTEEGTSTEPSEGSAPGSEPATSGSETPGSEPATSGSETPGSEPATSGSETPGTSTEPSEGSAPGTSESATPESGPGSEPATSGSETPGTSTEPSEGSAP

SEQ ID NO: 1572 - protein, 1592 aa, synthetic construct
  REGION 1..1592: note = Description of Artificial Sequence: Synthetic polypeptide
ATRRYYLGAVELSWDYMQSDLGELPVDARFPPRVPKSFPFNTSVVYKKTLFVEFTVHLFNIAKPRPPWMGLLGPTIQAEVYDTVVITLKNMASHPVSLHAVGVSYWKASEGAEYDDQTSQREKEDDKVFPGGSHTYVWQVLKENGPMASDPLCLTYSYLSHVDLVKDLNSGLIGALLVCREGSLAKEKTQTLHKFILLFAVFDEGKSWHSETKNSLMQDRDAASARAWPKMHTVNGYVNRSLPGLIGCHRKSVYWHVIGMGTTPEVHSIFLEGHTFLVRNHRQASLEISPITFLTAQTLLMDLGQFLLFCHISSHQHDGMEAYVKVDSCPEEPQLRMKNNEEAEDYDDDLTDSEMDVVRFDDDNSPSFIQIRSVAKKHPKTWVHYIAAEEEDWDYAPLVLAPDDRSYKSQYLNNGPQRIGRKYKKVRFMAYTDETFKTREAIQHESGILGPLLYGEVGDTLLIIFKNQASRPYNIYPHGITDVRPLYSRRLPKGVKHLKDFPILPGEIFKYKWTVTVEDGPTKSDPRCLTRYYSSFVNMERDLASGLIGPLLICYKESVDQRGNQIMSDKRNVILFSVFDENRSWYLTENIQRFLPNPAGVQLEDPEFQASNIMHSINGYVFDSLQLSVCLHEVAYWYILSIGAQTDFLSVFFSGYTFKHKMVYEDTLTLFPFSGETVFMSMENPGLWILGCHNSDFRNRGMTALLKVSSCDKNTGDYYEDSYEDISAYLLSKNNAIEPRSFSQNPPVLKRHQGEITRTTLQSDQEEIDYDDTISVEMKKEDFDIYDEDENQSPRSFQKKTRHYFIAAVERLWDYGMSSSPHVLRNRAQSGSVPQFKKVVFQEFTDGSFTQPLYRGELNEHLGLLGPYIRAEVEDNIMVTFRNQASRPYSFYSSLISYEEDQRQGAEPRKNFVKPNETKTYFWKVQHHMAPTKDEFDCKAWAYFSDVDLEKDVHSGLIGPLLVCHTNTLNPAHGRQVTVQEFALFFTIFDETKSWYFTENMERNCRAPCNIQMEDPTFKENYRFHAINGYIMDTLPGLVMAQDQRIRWYLLSMGSNENIHSIHFSGHVFTVRKKEEYKMALYNLYPGVFETVEMLPSKAGIWRVECLIGEHLHAGMSTLFLVYSNKCQTPLGMASGHIRDFQITASGQYGQWAPKLARLHYSGSINAWSTKEPFSWIKVDLLAPMIIHGIKTQGARQKFSSLYISQFIIMYSLDGKKWQTYRGNSTGTLMVFFGNVDSSGIKHNIFNPPIIARYIRLHPTHYSIRSTLRMELMGCDLNSCSMPLGMESKAISDAQITASSYFTNMFATWSPSKARLHLQGRSNAWRPQVNNPKEWLQVDFQKTMKVTGVTTQGVKSLLTSMYVKEFLISSSQDGHQWTLFFQNGKVKVFQGNQDSFTPVVNSLDPPLLTRYLRIHPQSWVHQIALRMEVLGCEAQDLYGLTPRSLLVGGSEPATSGSETPGTSESATPESGPGSEPATSGSETPGSPAGSPTSTEEGTSTEPSEGSAPGSEPATSGSETPGSEPATSGSETPGSEPATSGSETPGTSTEPSEGSAPGTSESATPESGPGSEPATSGSETPGTSTEPSEGSAP

SEQ ID NO: 1573 - protein, 2457 aa, synthetic construct
  REGION 1..2457: note = Description of Artificial Sequence: Synthetic polypeptide
GSEPATSGSETPGTSESATPESGPGSEPATSGSETPGSPAGSPTSTEEGTSTEPSEGSAPGSEPATSGSETPGSEPATSGSETPGSEPATSGSETPGTSTEPSEGSAPGTSESATPESGPGSEPATSGSETPGTSTEPSEGSAPGATRRYYLGAVELSWDYMQSDLGELPVDARFPPRVPKSFPFNTSVVYKKTLFVEFTVHLFNIAKPRPPWMGLLGPTIQAEVYDTVVITLKNMASHPVSLHAVGVSYWKASEGAEYDDQTSQREKEDDKVFPGGSHTYVWQVLKENGPMASDPLCLTYSYLSHVDLVKDLNSGLIGALLVCREGSLAKEKTQTLHKFILLFAVFDEGKSWHSETKNSLMQDRDAASARAWPKMHTVNGYVNRSLPGLIGCHRKSVYWHVIGMGTTPEVHSIFLEGHTFLVRNHRQASLEISPITFLTAQTLLMDLGQFLLFCHISSHQHDGMEAYVKVDSCPEEPQLRMKNNEEAEDYDDDLTDSEMDVVRFDDDNSPSFIQIRSVAKKHPKTWVHYIAAEEEDWDYAPLVLAPDDRSYKSQYLNNGPQRIGRKYKKVRFMAYTDETFKTREAIQHESGILGPLLYGEVGDTLLIIFKNQASRPYNIYPHGITDVRPLYSRRLPKGVKHLKDFPILPGEIFKYKWTVTVEDGPTKSDPRCLTRYYSSFVNMERDLASGLIGPLLICYKESVDQRGNQIMSDKRNVILFSVFDENRSWYLTENIQRFLPNPAGVQLEDPEFQASNIMHSINGYVFDSLQLSVCLHEVAYWYILSIGAQTDFLSVFFSGYTFKHKMVYEDTLTLFPFSGETVFMSMENPGLWILGCHNSDFRNRGMTALLKVSSCDKNTGDYYEDSYEDISAYLLSKNNAIEPRSFSQNPPVLKRHQREITRTTLQSDQEEIDYDDTISVEMKKEDFDIYDEDENQSPRSFQKKTRHYFIAAVERLWDYGMSSSPHVLRNRAQSGSVPQFKKVVFQEFTDGSFTQPLYRGELNEHLGLLGPYIRAEVEDNIMVTFRNQASRPYSFYSSLISYEEDQRQGAEPRKNFVKPNETKTYFWKVQHHMAPTKDEFDCKAWAYFSDVDLEKDVHSGLIGPLLVCHTNTLNPAHGRQVTVQEFALFFTIFDETKSWYFTENMERNCRAPCNIQMEDPTFKENYRFHAINGYIMDTLPGLVMAQDQRIRWYLLSMGSNENIHSIHFSGHVFTVRKKEEYKMALYNLYPGVFETVEMLPSKAGIWRVECLIGEHLHAGMSTLFLVYSNKCQTPLGMASGHIRDFQITASGQYGQWAPKLARLHYSGSINAWSTKEPFSWIKVDLLAPMIIHGIKTQGARQKFSSLYISQFIIMYSLDGKKWQTYRGNSTGTLMVFFGNVDSSGIKHNIFNPPIIARYIRLHPTHYSIRSTLRMELMGCDLNSCSMPLGMESKAISDAQITASSYFTNMFATWSPSKARLHLQGRSNAWRPQVNNPKEWLQVDFQKTMKVTGVTTQGVKSLLTSMYVKEFLISSSQDGHQWTLFFQNGKVKVFQGNQDSFTPVVNSLDPPLLTRYLRIHPQSWVHQIALRMEVLGCEAQDLYGAPLGLRLRGGSPAGSPTSTEEGTSESATPESGPGTSTEPSEGSAPGSPAGSPTSTEEGTSTEPSEGSAPGTSTEPSEGSAPGTSESATPESGPGSEPATSGSETPGSEPATSGSETPGSPAGSPTSTEEGTSESATPESGPGTSTEPSEGSAPGTSTEPSEGSAPGSPAGSPTSTEEGTSTEPSEGSAPGTSTEPSEGSAPGTSESATPESGPGTSTEPSEGSAPGTSESATPESGPGSEPATSGSETPGTSTEPSEGSAPGTSTEPSEGSAPGTSESATPESGPGTSESATPESGPGSPAGSPTSTEEGTSESATPESGPGSEPATSGSETPGTSESATPESGPGTSTEPSEGSAPGTSTEPSEGSAPGTSTEPSEGSAPGTSTEPSEGSAPGTSTEPSEGSAPGTSTEPSEGSAPGSPAGSPTSTEEGTSTEPSEGSAPGTSESATPESGPGSEPATSGSETPGTSESATPESGPGSEPATSGSETPGTSESATPESGPGTSTEPSEGSAPGTSESATPESGPGSPAGSPTSTEEGSPAGSPTSTEEGSPAGSPTSTEEGTSESATPESGPGTSTEPSEGSAPGTSESATPESGPGSEPATSGSETPGTSESATPESGPGSEPATSGSETPGTSESATPESGPGTSTEPSEGSAPGSPAGSPTSTEEGTSESATPESGPGSEPATSGSETPGTSESATPESGPGSPAGSPTSTEEGSPAGSPTSTEEGTSTEPSEGSAPGTSESATPESGPGTSESATPESGPGTSESATPESGPGSEPATSGSETPGSEPATSGSETPGSPAGSPTSTEEGTSTEPSEGSAPGTSTEPSEGSAPGSEPATSGSETPGTSESATPESGPGTSTEPSEGSAP

SEQ ID NO: 1574 - protein, 2457 aa, synthetic construct
  REGION 1..2457: note = Description of Artificial Sequence: Synthetic polypeptide
GSEPATSGSETPGTSESATPESGPGSEPATSGSETPGSPAGSPTSTEEGTSTEPSEGSAPGSEPATSGSETPGSEPATSGSETPGSEPATSGSETPGTSTEPSEGSAPGTSESATPESGPGSEPATSGSETPGTSTEPSEGSAPGATRRYYLGAVELSWDYMQSDLGELPVDARFPPRVPKSFPFNTSVVYKKTLFVEFTVHLFNIAKPRPPWMGLLGPTIQAEVYDTVVITLKNMASHPVSLHAVGVSYWKASEGAEYDDQTSQREKEDDKVFPGGSHTYVWQVLKENGPMASDPLCLTYSYLSHVDLVKDLNSGLIGALLVCREGSLAKEKTQTLHKFILLFAVFDEGKSWHSETKNSLMQDRDAASARAWPKMHTVNGYVNRSLPGLIGCHRKSVYWHVIGMGTTPEVHSIFLEGHTFLVRNHRQASLEISPITFLTAQTLLMDLGQFLLFCHISSHQHDGMEAYVKVDSCPEEPQLRMKNNEEAEDYDDDLTDSEMDVVRFDDDNSPSFIQIRSVAKKHPKTWVHYIAAEEEDWDYAPLVLAPDDRSYKSQYLNNGPQRIGRKYKKVRFMAYTDETFKTREAIQHESGILGPLLYGEVGDTLLIIFKNQASRPYNIYPHGITDVRPLYSRRLPKGVKHLKDFPILPGEIFKYKWTVTVEDGPTKSDPRCLTRYYSSFVNMERDLASGLIGPLLICYKESVDQRGNQIMSDKRNVILFSVFDENRSWYLTENIQRFLPNPAGVQLEDPEFQASNIMHSINGYVFDSLQLSVCLHEVAYWYILSIGAQTDFLSVFFSGYTFKHKMVYEDTLTLFPFSGETVFMSMENPGLWILGCHNSDFRNRGMTALLKVSSCDKNTGDYYEDSYEDISAYLLSKNNAIEPRSFSQNPPVLKRHQREITRTTLQSDQEEIDYDDTISVEMKKEDFDIYDEDENQSPRSFQKKTRHYFIAAVERLWDYGMSSSPHVLRNRAQSGSVPQFKKVVFQEFTDGSFTQPLYRGELNEHLGLLGPYIRAEVEDNIMVTFRNQASRPYSFYSSLISYEEDQRQGAEPRKNFVKPNETKTYFWKVQHHMAPTKDEFDCKAWAYFSDVDLEKDVHSGLIGPLLVCHTNTLNPAHGRQVTVQEFALFFTIFDETKSWYFTENMERNCRAPCNIQMEDPTFKENYRFHAINGYIMDTLPGLVMAQDQRIRWYLLSMGSNENIHSIHFSGHVFTVRKKEEYKMALYNLYPGVFETVEMLPSKAGIWRVECLIGEHLHAGMSTLFLVYSNKCQTPLGMASGHIRDFQITASGQYGQWAPKLARLHYSGSINAWSTKEPFSWIKVDLLAPMIIHGIKTQGARQKFSSLYISQFIIMYSLDGKKWQTYRGNSTGTLMVFFGNVDSSGIKHNIFNPPIIARYIRLHPTHYSIRSTLRMELMGCDLNSCSMPLGMESKAISDAQITASSYFTNMFATWSPSKARLHLQGRSNAWRPQVNNPKEWLQVDFQKTMKVTGVTTQGVKSLLTSMYVKEFLISSSQDGHQWTLFFQNGKVKVFQGNQDSFTPVVNSLDPPLLTRYLRIHPQSWVHQIALRMEVLGCEAQDLYGTMTRIVGGGGSPAGSPTSTEEGTSESATPESGPGTSTEPSEGSAPGSPAGSPTSTEEGTSTEPSEGSAPGTSTEPSEGSAPGTSESATPESGPGSEPATSGSETPGSEPATSGSETPGSPAGSPTSTEEGTSESATPESGPGTSTEPSEGSAPGTSTEPSEGSAPGSPAGSPTSTEEGTSTEPSEGSAPGTSTEPSEGSAPGTSESATPESGPGTSTEPSEGSAPGTSESATPESGPGSEPATSGSETPGTSTEPSEGSAPGTSTEPSEGSAPGTSESATPESGPGTSESATPESGPGSPAGSPTSTEEGTSESATPESGPGSEPATSGSETPGTSESATPESGPGTSTEPSEGSAPGTSTEPSEGSAPGTSTEPSEGSAPGTSTEPSEGSAPGTSTEPSEGSAPGTSTEPSEGSAPGSPAGSPTSTEEGTSTEPSEGSAPGTSESATPESGPGSEPATSGSETPGTSESATPESGPGSEPATSGSETPGTSESATPESGPGTSTEPSEGSAPGTSESATPESGPGSPAGSPTSTEEGSPAGSPTSTEEGSPAGSPTSTEEGTSESATPESGPGTSTEPSEGSAPGTSESATPESGPGSEPATSGSETPGTSESATPESGPGSEPATSGSETPGTSESATPESGPGTSTEPSEGSAPGSPAGSPTSTEEGTSESATPESGPGSEPATSGSETPGTSESATPESGPGSPAGSPTSTEEGSPAGSPTSTEEGTSTEPSEGSAPGTSESATPESGPGTSESATPESGPGTSESATPESGPGSEPATSGSETPGSEPATSGSETPGSPAGSPTSTEEGTSTEPSEGSAPGTSTEPSEGSAPGSEPATSGSETPGTSESATPESGPGTSTEPSEGSAP

SEQ ID NO: 1575 - protein, 2168 aa, synthetic construct
  REGION 1..2168: note = Description of Artificial Sequence: Synthetic polypeptide
SGTASSSPGSSTPSGATGSPGTPGSGTASSSPGSSTPSGATGSPGSSTPSGATGSPGSSPSASTGTGPGSSPSASTGTGPGASPGTSSTGSPGTPGSGTASSSPGSSTPSGATGSPGSSPSASTGTGPGSSPSASTGTGPGASPGATRRYYLGAVELSWDYMQSDLGELPVDARFPPRVPKSFPFNTSVVYKKTLFVEFTVHLFNIAKPRPPWMGLLGPTIQAEVYDTVVITLKNMASHPVSLHAVGVSYWKASEGAEYDDQTSQREKEDDKVFPGGSHTYVWQVLKENGPMASDPLCLTYSYLSHVDLVKDLNSGLIGALLVCREGSLAKEKTQTLHKFILLFAVFDEGKSWHSETKNSLMQDRDAASARAWPKMHTVNGYVNRSLPGLIGCHRKSVYWHVIGMGTTPEVHSIFLEGHTFLVRNHRQASLEISPITFLTAQTLLMDLGQFLLFCHISSHQHDGMEAYVKVDSCPEEPQLRMKNNEEAEDYDDDLTDSEMDVVRFDDDNSPSFIQIRSVAKKHPKTWVHYIAAEEEDWDYAPLVLAPDDRSYKSQYLNNGPQRIGRKYKKVRFMAYTDETFKTREAIQHESGILGPLLYGEVGDTLLIIFKNQASRPYNIYPHGITDVRPLYSRRLPKGVKHLKDFPILPGEIFKYKWTVTVEDGPTKSDPRCLTRYYSSFVNMERDLASGLIGPLLICYKESVDQRGNQIMSDKRNVILFSVFDENRSWYLTENIQRFLPNPAGVQLEDPEFQASNIMHSINGYVFDSLQLSVCLHEVAYWYILSIGAQTDFLSVFFSGYTFKHKMVYEDTLTLFPFSGETVFMSMENPGLWILGCHNSDFRNRGMTALLKVSSCDKNTGDYYEDSYEDISAYLLSKNNAIEPRSFSQNPPVLKRHQREITRTTLQSDQEEIDYDDTISVEMKKEDFDIYDEDENQSPRSFQKKTRHYFIAAVERLWDYGMSSSPHVLRNRAQSGSVPQFKKVVFQEFTDGSFTQPLYRGELNEHLGLLGPYIRAEVEDNIMVTFRNQASRPYSFYSSLISYEEDQRQGAEPRKNFVKPNETKTYFWKVQHHMAPTKDEFDCKAWAYFSDVDLEKDVHSGLIGPLLVCHTNTLNPAHGRQVTVQEFALFFTIFDETKSWYFTENMERNCRAPCNIQMEDPTFKENYRFHAINGYIMDTLPGLVMAQDQRIRWYLLSMGSNENIHSIHFSGHVFTVRKKEEYKMALYNLYPGVFETVEMLPSKAGIWRVECLIGEHLHAGMSTLFLVYSNKCQTPLGMASGHIRDFQITASGQYGQWAPKLARLHYSGSINAWSTKEPFSWIKVDLLAPMIIHGIKTQGARQKFSSLYISQFIIMYSLDGKKWQTYRGNSTGTLMVFFGNVDSSGIKHNIFNPPIIARYIRLHPTHYSIRSTLRMELMGCDLNSCSMPLGMESKAISDAQITASSYFTNMFATWSPSKARLHLQGRSNAWRPQVNNPKEWLQVDFQKTMKVTGVTTQGVKSLLTSMYVKEFLISSSQDGHQWTLFFQNGKVKVFQGNQDSFTPVVNSLDPPLLTRYLRIHPQSWVHQIALRMEVLGCEAQDLYGKLTRAETGPGTPGSGTASSSPGSSTPSGATGSPGSSPSASTGTGPGSSPSASTGTGPGSSTPSGATGSPGSSTPSGATGSPGASPGTSSTGSPGASPGTSSTGSPGASPGTSSTGSPGTPGSGTASSSPGASPGTSSTGSPGASPGTSSTGSPGASPGTSSTGSPGSSPSASTGTGPGTPGSGTASSSPGASPGTSSTGSPGASPGTSSTGSPGASPGTSSTGSPGSSTPSGATGSPGSSTPSGATGSPGASPGTSSTGSPGTPGSGTASSSPGSSTPSGATGSPGSSTPSGATGSPGSSTPSGATGSPGSSPSASTGTGPGASPGTSSTGSPGASPGTSSTGSPGTPGSGTASSSPGASPGTSSTGSPGASPGTSSTGSPGASPGTSSTGSPGASPGTSSTGSPGTPGSGTASSSPGSSTPSGATGSPGTPGSGTASSSPGSSTPSGATGSPGTPGSGTASSSPGSSTPSGATGSPGSSTPSGATGSPGSSPSASTGTGPGSSPSASTGTGPGASPGTSSTGSPGTPGSGTASSSPGSSTPSGATGSPGSSPSASTGTGPGSSPSASTGTGPGASPGTSSTGS

SEQ ID NO: 1576 - protein, 2456 aa, synthetic construct
  REGION 1..2456: note = Description of Artificial Sequence: Synthetic polypeptide
GSEPATSGSETPGTSESATPESGPGSEPATSGSETPGSPAGSPTSTEEGTSTEPSEGSAPGSEPATSGSETPGSEPATSGSETPGSEPATSGSETPGTSTEPSEGSAPGTSESATPESGPGSEPATSGSETPGTSTEPSEGSAPGKLTRAETGATRRYYLGAVELSWDYMQSDLGELPVDARFPPRVPKSFPFNTSVVYKKTLFVEFTDHLFNIAKPRPPWMGLLGPTIQAEVYDTVVITLKNMASHPVSLHAVGVSYWKASEGAEYDDQTSQREKEDDKVFPGGSHTYVWQVLKENGPMASDPLCLTYSYLSHVDLVKDLNSGLIGALLVCREGSLAKEKTQTLHKFILLFAVFDEGKSWHSETKNSLMQDRDAASARAWPKMHTVNGYVNRSLPGLIGCHRKSVYWHVIGMGTTPEVHSIFLEGHTFLVRNHRQASLEISPITFLTAQTLLMDLGQFLLFCHISSHQHDGMEAYVKVDSCPEEPQLRMKNNEEAEDYDDDLTDSEMDVVRFDDDNSPSFIQIRSVAKKHPKTWVHYIAAEEEDWDYAPLVLAPDDRSYKSQYLNNGPQRIGRKYKKVRFMAYTDETFKTREAIQHESGILGPLLYGEVGDTLLIIFKNQASRPYNIYPHGITDVRPLYSRRLPKGVKHLKDFPILPGEIFKYKWTVTVEDGPTKSDPRCLTRYYSSFVNMERDLASGLIGPLLICYKESVDQRGNQIMSDKRNVILFSVFDENRSWYLTENIQRFLPNPAGVQLEDPEFQASNIMHSINGYVFDSLQLSVCLHEVAYWYILSIGAQTDFLSVFFSGYTFKHKMVYEDTLTLFPFSGETVFMSMENPGLWILGCHNSDFRNRGMTALLKVSSCDKNTGDYYEDSYEDISAYLLSKNNAIEPRSFSQNPPVLKRHQREITRTTLQSDQEEIDYDDTISVEMKKEDFDIYDEDENQSPRSFQKKTRHYFIAAVERLWDYGMSSSPHVLRNRAQSGSVPQFKKVVFQEFTDGSFTQPLYRGELNEHLGLLGPYIRAEVEDNIMVTFRNQASRPYSFYSSLISYEEDQRQGAEPRKNFVKPNETKTYFWKVQHHMAPTKDEFDCKAWAYFSDVDLEKDVHSGLIGPLLVCHTNTLNPAHGRQVTVQEFALFFTIFDETKSWYFTENMERNCRAPCNIQMEDPTFKENYRFHAINGYIMDTLPGLVMAQDQRIRWYLLSMGSNENIHSIHFSGHVFTVRKKEEYKMALYNLYPGVFETVEMLPSKAGIWRVECLIGEHLHAGMSTLFLVYSNKCQTPLGMASGHIRDFQITASGQYGQWAPKLARLHYSGSINAWSTKEPFSWIKVDLLAPMIIHGIKTQGARQKFSSLYISQFIIMYSLDGKKWQTYRGNSTGTLMVFFGNVDSSGIKHNIFNPPIIARYIRLHPTHYSIRSTLRMELMGCDLNSCSMPLGMESKAISDAQITASSYFTNMFATWSPSKARLHLQGRSNAWRPQVNNPKEWLQVDFQKTMKVTGVTTQGVKSLLTSMYVKEFLISSSQDGHQWTLFFQNGKVKVFQGNQDSFTPVVNSLDPPLLTRYLRIHPQSWVHQIALRMEVLGCEAQDLYGGSPAGSPTSTEEGTSESATPESGPGTSTEPSEGSAPGSPAGSPTSTEEGTSTEPSEGSAPGTSTEPSEGSAPGTSESATPESGPGSEPATSGSETPGSEPATSGSETPGSPAGSPTSTEEGTSESATPESGPGTSTEPSEGSAPGTSTEPSEGSAPGSPAGSPTSTEEGTSTEPSEGSAPGTSTEPSEGSAPGTSESATPESGPGTSTEPSEGSAPGTSESATPESGPGSEPATSGSETPGTSTEPSEGSAPGTSTEPSEGSAPGTSESATPESGPGTSESATPESGPGSPAGSPTSTEEGTSESATPESGPGSEPATSGSETPGTSESATPESGPGTSTEPSEGSAPGTSTEPSEGSAPGTSTEPSEGSAPGTSTEPSEGSAPGTSTEPSEGSAPGTSTEPSEGSAPGSPAGSPTSTEEGTSTEPSEGSAPGTSESATPESGPGSEPATSGSETPGTSESATPESGPGSEPATSGSETPGTSESATPESGPGTSTEPSEGSAPGTSESATPESGPGSPAGSPTSTEEGSPAGSPTSTEEGSPAGSPTSTEEGTSESATPESGPGTSTEPSEGSAPGTSESATPESGPGSEPATSGSETPGTSESATPESGPGSEPATSGSETPGTSESATPESGPGTSTEPSEGSAPGSPAGSPTSTEEGTSESATPESGPGSEPATSGSETPGTSESATPESGPGSPAGSPTSTEEGSPAGSPTSTEEGTSTEPSEGSAPGTSESATPESGPGTSESATPESGPGTSESATPESGPGSEPATSGSETPGSEPATSGSETPGSPAGSPTSTEEGTSTEPSEGSAPGTSTEPSEGSAPGSEPATSGSETPGTSESATPESGPGTSTEPSEGSAP

SEQ ID NO: 1577 - protein, 2457 aa, synthetic construct
  REGION 1..2457: note = Description of Artificial Sequence: Synthetic polypeptide
GSEPATSGSETPGTSESATPESGPGSEPATSGSETPGSPAGSPTSTEEGTSTEPSEGSAPGSEPATSGSETPGSEPATSGSETPGSEPATSGSETPGTSTEPSEGSAPGTSESATPESGPGSEPATSGSETPGTSTEPSEGSAPGATRRYYLGAVELSWDYMQSDLGELPVDARFPPRVPKSFPFNTSVVYKKTLFVEFTVHLFNIAKPRPPWMGLLGPTIQAEVYDTVVITLKNMASHPVSLHAVGVSYWKASEGAEYDDQTSQREKEDDKVFPGGSHTYVWQVLKENGPMASDPLCLTYSYLSHVDLVKDLNSGLIGALLVCREGSLAKEKTQTLHKFILLFAVFDEGKSWHSETKNSLMQDRDAASARAWPKMHTVNGYVNRSLPGLIGCHRKSVYWHVIGMGTTPEVHSIFLEGHTFLVRNHRQASLEISPITFLTAQTLLMDLGQFLLFCHISSHQHDGMEAYVKVDSCPEEPQLRMKNNEEAEDYDDDLTDSEMDVVRFDDDNSPSFIQIRSVAKKHPKTWVHYIAAEEEDWDYAPLVLAPDDRSYKSQYLNNGPQRIGRKYKKVRFMAYTDETFKTREAIQHESGILGPLLYGEVGDTLLIIFKNQASRPYNIYPHGITDVRPLYSRRLPKGVKHLKDFPILPGEIFKYKWTVTVEDGPTKSDPRCLTRYYSSFVNMERDLASGLIGPLLICYKESVDQRGNQIMSDKRNVILFSVFDENRSWYLTENIQRFLPNPAGVQLEDPEFQASNIMHSINGYVFDSLQLSVCLHEVAYWYILSIGAQTDFLSVFFSGYTFKHKMVYEDTLTLFPFSGETVFMSMENPGLWILGCHNSDFRNRGMTALLKVSSCDKNTGDYYEDSYEDISAYLLSKNNAIEPRSFSQNPPVLKRHQREITRTTLQSDQEEIDYDDTISVEMKKEDFDIYDEDENQSPRSFQKKTRHYFIAAVERLWDYGMSSSPHVLRNRAQSGSVPQFKKVVFQEFTDGSFTQPLYRGELNEHLGLLGPYIRAEVEDNIMVTFRNQASRPYSFYSSLISYEEDQRQGAEPRKNFVKPNETKTYFWKVQHHMAPTKDEFDCKAWAYFSDVDLEKDVHSGLIGPLLVCHTNTLNPAHGRQVTVQEFALFFTIFDETKSWYFTENMERNCRAPCNIQMEDPTFKENYRFHAINGYIMDTLPGLVMAQDQRIRWYLLSMGSNENIHSIHFSGHVFTVRKKEEYKMALYNLYPGVFETVEMLPSKAGIWRVECLIGEHLHAGMSTLFLVYSNKCQTPLGMASGHIRDFQITASGQYGQWAPKLARLHYSGSINAWSTKEPFSWIKVDLLAPMIIHGIKTQGARQKFSSLYISQFIIMYSLDGKKWQTYRGNSTGTLMVFFGNVDSSGIKHNIFNPPIIARYIRLHPTHYSIRSTLRMELMGCDLNSCSMPLGMESKAISDAQITASSYFTNMFATWSPSKARLHLQGRSNAWRPQVNNPKEWLQVDFQKTMKVTGVTTQGVKSLLTSMYVKEFLISSSQDGHQWTLFFQNGKVKVFQGNQDSFTPVVNSLDPPLLTRYLRIHPQSWVHQIALRMEVLGCEAQDLYGLTPRSLLVGGSPAGSPTSTEEGTSESATPESGPGTSTEPSEGSAPGSPAGSPTSTEEGTSTEPSEGSAPGTSTEPSEGSAPGTSESATPESGPGSEPATSGSETPGSEPATSGSETPGSPAGSPTSTEEGTSESATPESGPGTSTEPSEGSAPGTSTEPSEGSAPGSPAGSPTSTEEGTSTEPSEGSAPGTSTEPSEGSAPGTSESATPESGPGTSTEPSEGSAPGTSESATPESGPGSEPATSGSETPGTSTEPSEGSAPGTSTEPSEGSAPGTSESATPESGPGTSESATPESGPGSPAGSPTSTEEGTSESATPESGPGSEPATSGSETPGTSESATPESGPGTSTEPSEGSAPGTSTEPSEGSAPGTSTEPSEGSAPGTSTEPSEGSAPGTSTEPSEGSAPGTSTEPSEGSAPGSPAGSPTSTEEGTSTEPSEGSAPGTSESATPESGPGSEPATSGSETPGTSESATPESGPGSEPATSGSETPGTSESATPESGPGTSTEPSEGSAPGTSESATPESGPGSPAGSPTSTEEGSPAGSPTSTEEGSPAGSPTSTEEGTSESATPESGPGTSTEPSEGSAPGTSESATPESGPGSEPATSGSETPGTSESATPESGPGSEPATSGSETPGTSESATPESGPGTSTEPSEGSAPGSPAGSPTSTEEGTSESATPESGPGSEPATSGSETPGTSESATPESGPGSPAGSPTSTEEGSPAGSPTSTEEGTSTEPSEGSAPGTSESATPESGPGTSESATPESGPGTSESATPESGPGSEPATSGSETPGSEPATSGSETPGSPAGSPTSTEEGTSTEPSEGSAPGTSTEPSEGSAPGSEPATSGSETPGTSESATPESGPGTSTEPSEGSAP

SEQ ID NO: 1578 - protein, 3351 aa, synthetic construct
  REGION 1..3351: note = Description of Artificial Sequence: Synthetic polypeptide
GSPAGSPTSTEEGTSESATPESGPGTSTEPSEGSAPGSPAGSPTSTEEGTSTEPSEGSAPGTSTEPSEGSAPGTSESATPESGPGSEPATSGSETPGSEPATSGSETPGSPAGSPTSTEEGTSESATPESGPGTSTEPSEGSAPGTSTEPSEGSAPGSPAGSPTSTEEGTSTEPSEGSAPGTSTEPSEGSAPGTSESATPESGPGTSTEPSEGSAPGTSESATPESGPGSEPATSGSETPGTSTEPSEGSAPGTSTEPSEGSAPGTSESATPESGPGTSESATPESGPGSPAGSPTSTEEGTSESATPESGPGSEPATSGSETPGTSESATPESGPGTSTEPSEGSAPGTSTEPSEGSAPGTSTEPSEGSAPGTSTEPSEGSAPGTSTEPSEGSAPGTSTEPSEGSAPGSPAGSPTSTEEGTSTEPSEGSAPGTSESATPESGPGSEPATSGSETPGTSESATPESGPGSEPATSGSETPGTSESATPESGPGTSTEPSEGSAPGTSESATPESGPGSPAGSPTSTEEGSPAGSPTSTEEGSPAGSPTSTEEGTSESATPESGPGTSTEPSEGSAPGTSESATPESGPGSEPATSGSETPGTSESATPESGPGSEPATSGSETPGTSESATPESGPGTSTEPSEGSAPGSPAGSPTSTEEGTSESATPESGPGSEPATSGSETPGTSESATPESGPGSPAGSPTSTEEGSPAGSPTSTEEGTSTEPSEGSAPGTSESATPESGPGTSESATPESGPGTSESATPESGPGSEPATSGSETPGSEPATSGSETPGSPAGSPTSTEEGTSTEPSEGSAPGTSTEPSEGSAPGSEPATSGSETPGTSESATPESGPGTSTEPSEGSAPGATRRYYLGAVELSWDYMQSDLGELPVDARFPPRVPKSFPFNTSVVYKKTLFVEFTDHLFNIAKPRPPWMGLLGPTIQAEVYDTVVITLKNMASHPVSLHAVGVSYWKASEGAEYDDQTSQREKEDDKVFPGGSHTYVWQVLKENGPMASDPLCLTYSYLSHVDLVKDLNSGLIGALLVCREGSLAKEKTQTLHKFILLFAVFDEGKSWHSETKNSLMQDRDAASARAWPKMHTVNGYVNRSLPGLIGCHRKSVYWHVIGMGTTPEVHSIFLEGHTFLVRNHRQASLEISPITFLTAQTLLMDLGQFLLFCHISSHQHDGMEAYVKVDSCPEEPQLRMKNNEEAEDYDDDLTDSEMDVVRFDDDNSPSFIQIRSVAKKHPKTWVHYIAAEEEDWDYAPLVLAPDDRSYKSQYLNNGPQRIGRKYKKVRFMAYTDETFKTREAIQHESGILGPLLYGEVGDTLLIIFKNQASRPYNIYPHGITDVRPLYSRRLPKGVKHLKDFPILPGEIFKYKWTVTVEDGPTKSDPRCLTRYYSSFVNMERDLASGLIGPLLICYKESVDQRGNQIMSDKRNVILFSVFDENRSWYLTENIQRFLPNPAGVQLEDPEFQASNIMHSINGYVFDSLQLSVCLHEVAYWYILSIGAQTDFLSVFFSGYTFKHKMVYEDTLTLFPFSGETVFMSMENPGLWILGCHNSDFRNRGMTALLKVSSCDKNTGDYYEDSYEDISAYLLSKNNAIEPRSFSQNSRHPSTRQKQFNATTIPENDIEKTDPWFAHRTPMPKIQNVSSSDLLMLLRQSPTPHGLSLSDLQEAKYETFSDDPSPGAIDSNNSLSEMTHFRPQLHHSGDMVFTPESGLQLRLNEKLGTTAATELKKLDFKVSSTSNNLISTIPSDNLAAGTDNTSSLGPPSMPVHYDSQLDTTLFGKKSSPLTESGGPLSLSEENNDSKLLESGLMNSQESSWGKNVSSTESGRLFKGKRAHGPALLTKDNALFKVSISLLKTNKTSNNSATNRKTHIDGPSLLIENSPSVWQNILESDTEFKKVTPLIHDRMLMDKNATALRLNHMSNKTTSSKNMEMVQQKKEGPIPPDAQNPDMSFFKMLFLPESARWIQRTHGKNSLNSGQGPSPKQLVSLGPEKSVEGQNFLSEKNKVVVGKGEFTKDVGLKEMVFPSSRNLFLTNLDNLHENNTHNQEKKIQEEIEKKETLIQENVVLPQIHTVTGTKNFMKNLFLLSTRQNVEGSYDGAYAPVLQDFRSLNDSTNRTKKHTAHFSKKGEEENLEGLGNQTKQIVEKYACTTRISPNTSQQNFVTQRSKRALKQFRLPLEETELEKRIIVDDTSTQWSKNMKHLTPSTLTQIDYNEKEKGAITQSPLSDCLTRSHSIPQANRSPLPIAKVSSFPSIRPIYLTRVLFQDNSSHLPAASYRKKDSGVQESSHFLQGAKKNNLSLAILTLEMTGDQREVGSLGTSATNSVTYKKVENTVLPKPDLPKTSGKVELLPKVHIYQKDLFPTETSNGSPGHLDLVEGSLLQGTEGAIKWNEANRPGKVPFLRVATESSAKTPSKLLDPLAWDNHYGTQIPKEEWKSQEKSPEKTAFKKKDTILSLNACESNHAIAAINEGQNKPEIEVTWAKQGRTERLCSQNPPVLKRHQREITRTTLQSDQEEIDYDDTISVEMKKEDFDIYDEDENQSPRSFQKKTRHYFIAAVERLWDYGMSSSPHVLRNRAQSGSVPQFKKVVFQEFTDGSFTQPLYRGELNEHLGLLGPYIRAEVEDNIMVTFRNQASRPYSFYSSLISYEEDQRQGAEPRKNFVKPNETKTYFWKVQHHMAPTKDEFDCKAWAYFSDVDLEKDVHSGLIGPLLVCHTNTLNPAHGRQVTVQEFALFFTIFDETKSWYFTENMERNCRAPCNIQMEDPTFKENYRFHAINGYIMDTLPGLVMAQDQRIRWYLLSMGSNENIHSIHFSGHVFTVRKKEEYKMALYNLYPGVFETVEMLPSKAGIWRVECLIGEHLHAGMSTLFLVYSNKCQTPLGMASGHIRDFQITASGQYGQWAPKLARLHYSGSINAWSTKEPFSWIKVDLLAPMIIHGIKTQGARQKFSSLYISQFIIMYSLDGKKWQTYRGNSTGTLMVFFGNVDSSGIKHNIFNPPIIARYIRLHPTHYSIRSTLRMELMGCDLNSCSMPLGMESKAISDAQITASSYFTNMFATWSPSKARLHLQGRSNAWRPQVNNPKEWLQVDFQKTMKVTGVTTQGVKSLLTSMYVKEFLISSSQDGHQWTLFFQNGKVKVFQGNQDSFTPVVNSLDPPLLTRYLRIHPQSWVHQIALRMEVLGCEAQDLYGAPLGLRLRGGSEPATSGSETPGTSESATPESGPGSEPATSGSETPGSPAGSPTSTEEGTSTEPSEGSAPGSEPATSGSETPGSEPATSGSETPGSEPATSGSETPGTSTEPSEGSAPGTSESATPESGPGSEPATSGSETPGTSTEPSEGSAP

SEQ ID NO: 1579 - protein, 3369 aa, synthetic construct
  REGION 1..3369: note = Description of Artificial Sequence: Synthetic polypeptide
  VAR_SEQ 2924..2926: note = Any amino acid
  VAR_SEQ 2937..2940: note = Any amino acid
GTSTPESGSASPGTSPSGESSTAPGTSPSGESSTAPGSTSSTAESPGPGSTSESPSGTAPGSTSSTAESPGPGTSPSGESSTAPGTSTPESGSASPGSTSSTAESPGPGTSPSGESSTAPGTSPSGESSTAPGTSPSGESSTAPGTMTRIVGGATRRYYLGAVELSWDYMQSDLGELPVDARFPPRVPKSFPFNTSVVYKKTLFVEFTDHLFNIAKPRPPWMGLLGPTIQAEVYDTVVITLKNMASHPVSLHAVGVSYWKASEGAEYDDQTSQREKEDDKVFPGGSHTYVWQVLKENGPMASDPLCLTYSYLSHVDLVKDLNSGLIGALLVCREGSLAKEKTQTLHKFILLFAVFDEGKSWHSETKNSLMQDRDAASARAWPKMHTVNGYVNRSLPGLIGCHRKSVYWHVIGMGTTPEVHSIFLEGHTFLVRNHRQASLEISPITFLTAQTLLMDLGQFLLFCHISSHQHDGMEAYVKVDSCPEEPQLRMKNNEEAEDYDDDLTDSEMDVVRFDDDNSPSFIQIRSVAKKHPKTWVHYIAAEEEDWDYAPLVLAPDDRSYKSQYLNNGPQRIGRKYKKVRFMAYTDETFKTREAIQHESGILGPLLYGEVGDTLLIIFKNQASRPYNIYPHGITDVRPLYSRRLPKGVKHLKDFPILPGEIFKYKWTVTVEDGPTKSDPRCLTRYYSSFVNMERDLASGLIGPLLICYKESVDQRGNQIMSDKRNVILFSVFDENRSWYLTENIQRFLPNPAGVQLEDPEFQASNIMHSINGYVFDSLQLSVCLHEVAYWYILSIGAQTDFLSVFFSGYTFKHKMVYEDTLTLFPFSGETVFMSMENPGLWILGCHNSDFRNRGMTALLKVSSCDKNTGDYYEDSYEDISAYLLSKNNAIEPRSFSQNSRHPSTRQKQFNATTIPENDIEKTDPWFAHRTPMPKIQNVSSSDLLMLLRQSPTPHGLSLSDLQEAKYETFSDDPSPGAIDSNNSLSEMTHFRPQLHHSGDMVFTPESGLQLRLNEKLGTTAATELKKLDFKVSSTSNNLISTIPSDNLAAGTDNTSSLGPPSMPVHYDSQLDTTLFGKKSSPLTESGGPLSLSEENNDSKLLESGLMNSQESSWGKNVSSTESGRLFKGKRAHGPALLTKDNALFKVSISLLKTNKTSNNSATNRKTHIDGPSLLIENSPSVWQNILESDTEFKKVTPLIHDRMLMDKNATALRLNHMSNKTTSSKNMEMVQQKKEGPIPPDAQNPDMSFFKMLFLPESARWIQRTHGKNSLNSGQGPSPKQLVSLGPEKSVEGQNFLSEKNKVVVGKGEFTKDVGLKEMVFPSSRNLFLTNLDNLHENNTHNQEKKIQEEIEKKETLIQENVVLPQIHTVTGTKNFMKNLFLLSTRQNVEGSYDGAYAPVLQDFRSLNDSTNRTKKHTAHFSKKGEEENLEGLGNQTKQIVEKYACTTRISPNTSQQNFVTQRSKRALKQFRLPLEETELEKRIIVDDTSTQWSKNMKHLTPSTLTQIDYNEKEKGAITQSPLSDCLTRSHSIPQANRSPLPIAKVSSFPSIRPIYLTRVLFQDNSSHLPAASYRKKDSGVQESSHFLQGAKKNNLSLAILTLEMTGDQREVGSLGTSATNSVTYKKVENTVLPKPDLPKTSGKVELLPKVHIYQKDLFPTETSNGSPGHLDLVEGSLLQGTEGAIKWNEANRPGKVPFLRVATESSAKTPSKLLDPLAWDNHYGTQIPKEEWKSQEKSPEKTAFKKKDTILSLNACESNHAIAAINEGQNKPEIEVTWAKQGRTERLCSQNPPVLKRHQREITRTTLQSDQEEIDYDDTISVEMKKEDFDIYDEDENQSPRSFQKKTRHYFIAAVERLWDYGMSSSPHVLRNRAQSGSVPQFKKVVFQEFTDGSFTQPLYRGELNEHLGLLGPYIRAEVEDNIMVTFRNQASRPYSFYSSLISYEEDQRQGAEPRKNFVKPNETKTYFWKVQHHMAPTKDEFDCKAWAYFSDVDLEKDVHSGLIGPLLVCHTNTLNPAHGRQVTVQEFALFFTIFDETKSWYFTENMERNCRAPCNIQMEDPTFKENYRFHAINGYIMDTLPGLVMAQDQRIRWYLLSMGSNENIHSIHFSGHVFTVRKKEEYKMALYNLYPGVFETVEMLPSKAGIWRVECLIGEHLHAGMSTLFLVYSNKCQTPLGMASGHIRDFQITASGQYGQWAPKLARLHYSGSINAWSTKEPFSWIKVDLLAPMIIHGIKTQGARQKFSSLYISQFIIMYSLDGKKWQTYRGNSTGTLMVFFGNVDSSGIKHNIFNPPIIARYIRLHPTHYSIRSTLRMELMGCDLNSCSMPLGMESKAISDAQITASSYFTNMFATWSPSKARLHLQGRSNAWRPQVNNPKEWLQVDFQKTMKVTGVTTQGVKSLLTSMYVKEFLISSSQDGHQWTLFFQNGKVKVFQGNQDSFTPVVNSLDPPLLTRYLRIHPQSWVHQIALRMEVLGCEAQDLYGTMTRIVGGGSTSESPSGTAPGTSPSGESSTAPGSTSESPSGTAPGSTSESPSGTAPGTSTPESGSASPGTSTPESGSASPGSTSESPSGTAPGSTSESPSGTAPGTSPSGESSTAPGSTSESPSGTAPGTSPSGESSTAPGTSPSGESSTAPGSTSSTAESPGPGTSPSGESSTAPGTSPSGESSTAPGSTSSTAESPGPGTSTPESGSASPGTSTPESGSASPGSTSESPSGTAPGSTSESPSGTAPGTSTPESGSASPGSTSSTAESPGPGTSTPESGSASPGSTSESPSGTAPGTSPSGESSTAPGSTSSTAESPGPGTSPSGESSTAPGTSTPESGSASPGSTSSTAESPGPGSTSSTAESPGPGSTSSTAESPGPGSTSSTAESPGPGTSPSGESSTAPGSTSESPSGTAPGSTSESPSGTAPGTSTPESGPXXXGASASGAPSTXXXXSESPSGTAPGSTSESPSGTAPGSTSESPSGTAPGSTSESPSGTAPGSTSESPSGTAPGSTSESPSGTAPGTSTPESGSASPGTSPSGESSTAPGTSPSGESSTAPGSTSSTAESPGPGTSPSGESSTAPGTSTPESGSASPGSTSESPSGTAPGSTSESPSGTAPGTSPSGESSTAPGSTSESPSGTAPGTSTPESGSASPGTSTPESGSASPGSTSESPSGTAPGTSTPESGSASPGSTSSTAESPGPGSTSESPSGTAPGSTSESPSGTAPGTSPSGESSTAPGSTSSTAESPGPGTSPSGESSTAPGTSTPESGSASPGTSPSGESSTAPGTSPSGESSTAPGTSPSGESSTAPGSTSSTAESPGPGSTSSTAESPGPGTSPSGESSTAPGSSPSASTGTGPGSSTPSGATGSPGSSTPSGATGSP

SEQ ID NO: 1580 - protein, 3350 aa, synthetic construct
  REGION 1..3350: note = Description of Artificial Sequence: Synthetic polypeptide
GSPAGSPTSTEEGTSESATPESGPGTSTEPSEGSAPGSPAGSPTSTEEGTSTEPSEGSAPGTSTEPSEGSAPGTSESATPESGPGSEPATSGSETPGSEPATSGSETPGSPAGSPTSTEEGTSESATPESGPGTSTEPSEGSAPGTSTEPSEGSAPGSPAGSPTSTEEGTSTEPSEGSAPGTSTEPSEGSAPGTSESATPESGPGTSTEPSEGSAPGTSESATPESGPGSEPATSGSETPGTSTEPSEGSAPGTSTEPSEGSAPGTSESATPESGPGTSESATPESGPGSPAGSPTSTEEGTSESATPESGPGSEPATSGSETPGTSESATPESGPGTSTEPSEGSAPGTSTEPSEGSAPGTSTEPSEGSAPGTSTEPSEGSAPGTSTEPSEGSAPGTSTEPSEGSAPGSPAGSPTSTEEGTSTEPSEGSAPGTSESATPESGPGSEPATSGSETPGTSESATPESGPGSEPATSGSETPGTSESATPESGPGTSTEPSEGSAPGTSESATPESGPGSPAGSPTSTEEGSPAGSPTSTEEGSPAGSPTSTEEGTSESATPESGPGTSTEPSEGSAPGTSESATPESGPGSEPATSGSETPGTSESATPESGPGSEPATSGSETPGTSESATPESGPGTSTEPSEGSAPGSPAGSPTSTEEGTSESATPESGPGSEPATSGSETPGTSESATPESGPGSPAGSPTSTEEGSPAGSPTSTEEGTSTEPSEGSAPGTSESATPESGPGTSESATPESGPGTSESATPESGPGSEPATSGSETPGSEPATSGSETPGSPAGSPTSTEEGTSTEPSEGSAPGTSTEPSEGSAPGSEPATSGSETPGTSESATPESGPGTSTEPSEGSAPGATRRYYLGAVELSWDYMQSDLGELPVDARFPPRVPKSFPFNTSVVYKKTLFVEFTDHLFNIAKPRPPWMGLLGPTIQAEVYDTVVITLKNMASHPVSLHAVGVSYWKASEGAEYDDQTSQREKEDDKVFPGGSHTYVWQVLKENGPMASDPLCLTYSYLSHVDLVKDLNSGLIGALLVCREGSLAKEKTQTLHKFILLFAVFDEGKSWHSETKNSLMQDRDAASARAWPKMHTVNGYVNRSLPGLIGCHRKSVYWHVIGMGTTPEVHSIFLEGHTFLVRNHRQASLEISPITFLTAQTLLMDLGQFLLFCHISSHQHDGMEAYVKVDSCPEEPQLRMKNNEEAEDYDDDLTDSEMDVVRFDDDNSPSFIQIRSVAKKHPKTWVHYIAAEEEDWDYAPLVLAPDDRSYKSQYLNNGPQRIGRKYKKVRFMAYTDETFKTREAIQHESGILGPLLYGEVGDTLLIIFKNQASRPYNIYPHGITDVRPLYSRRLPKGVKHLKDFPILPGEIFKYKWTVTVEDGPTKSDPRCLTRYYSSFVNMERDLASGLIGPLLICYKESVDQRGNQIMSDKRNVILFSVFDENRSWYLTENIQRFLPNPAGVQLEDPEFQASNIMHSINGYVFDSLQLSVCLHEVAYWYILSIGAQTDFLSVFFSGYTFKHKMVYEDTLTLFPFSGETVFMSMENPGLWILGCHNSDFRNRGMTALLKVSSCDKNTGDYYEDSYEDISAYLLSKNNAIEPRSFSQNSRHPSTRQKQFNATTIPENDIEKTDPWFAHRTPMPKIQNVSSSDLLMLLRQSPTPHGLSLSDLQEAKYETFSDDPSPGAIDSNNSLSEMTHFRPQLHHSGDMVFTPESGLQLRLNEKLGTTAATELKKLDFKVSSTSNNLISTIPSDNLAAGTDNTSSLGPPSMPVHYDSQLDTTLFGKKSSPLTESGGPLSLSEENNDSKLLESGLMNSQESSWGKNVSSTESGRLFKGKRAHGPALLTKDNALFKVSISLLKTNKTSNNSATNRKTHIDGPSLLIENSPSVWQNILESDTEFKKVTPLIHDRMLMDKNATALRLNHMSNKTTSSKNMEMVQQKKEGPIPPDAQNPDMSFFKMLFLPESARWIQRTHGKNSLNSGQGPSPKQLVSLGPEKSVEGQNFLSEKNKVVVGKGEFTKDVGLKEMVFPSSRNLFLTNLDNLHENNTHNQEKKIQEEIEKKETLIQENVVLPQIHTVTGTKNFMKNLFLLSTRQNVEGSYDGAYAPVLQDFRSLNDSTNRTKKHTAHFSKKGEEENLEGLGNQTKQIVEKYACTTRISPNTSQQNFVTQRSKRALKQFRLPLEETELEKRIIVDDTSTQWSKNMKHLTPSTLTQIDYNEKEKGAITQSPLSDCLTRSHSIPQANRSPLPIAKVSSFPSIRPIYLTRVLFQDNSSHLPAASYRKKDSGVQESSHFLQGAKKNNLSLAILTLEMTGDQREVGSLGTSATNSVTYKKVENTVLPKPDLPKTSGKVELLPKVHIYQKDLFPTETSNGSPGHLDLVEGSLLQGTEGAIKWNEANRPGKVPFLRVATESSAKTPSKLLDPLAWDNHYGTQIPKEEWKSQEKSPEKTAFKKKDTILSLNACESNHAIAAINEGQNKPEIEVTWAKQGRTERLCSQNPPVLKRHQREITRTTLQSDQEEIDYDDTISVEMKKEDFDIYDEDENQSPRSFQKKTRHYFIAAVERLWDYGMSSSPHVLRNRAQSGSVPQFKKVVFQEFTDGSFTQPLYRGELNEHLGLLGPYIRAEVEDNIMVTFRNQASRPYSFYSSLISYEEDQRQGAEPRKNFVKPNETKTYFWKVQHHMAPTKDEFDCKAWAYFSDVDLEKDVHSGLIGPLLVCHTNTLNPAHGRQVTVQEFALFFTIFDETKSWYFTENMERNCRAPCNIQMEDPTFKENYRFHAINGYIMDTLPGLVMAQDQRIRWYLLSMGSNENIHSIHFSGHVFTVRKKEEYKMALYNLYPGVFETVEMLPSKAGIWRVECLIGEHLHAGMSTLFLVYSNKCQTPLGMASGHIRDFQITASGQYGQWAPKLARLHYSGSINAWSTKEPFSWIKVDLLAPMIIHGIKTQGARQKFSSLYISQFIIMYSLDGKKWQTYRGNSTGTLMVFFGNVDSSGIKHNIFNPPIIARYIRLHPTHYSIRSTLRMELMGCDLNSCSMPLGMESKAISDAQITASSYFTNMFATWSPSKARLHLQGRSNAWRPQVNNPKEWLQVDFQKTMKVTGVTTQGVKSLLTSMYVKEFLISSSQDGHQWTLFFQNGKVKVFQGNQDSFTPVVNSLDPPLLTRYLRIHPQSWVHQIALRMEVLGCEAQDLYGKLTRAETGGSEPATSGSETPGTSESATPESGPGSEPATSGSETPGSPAGSPTSTEEGTSTEPSEGSAPGSEPATSGSETPGSEPATSGSETPGSEPATSGSETPGTSTEPSEGSAPGTSESATPESGPGSEPATSGSETPGTSTEPSEGSAP

SEQ ID NO: 1581 - protein, 2456 aa, synthetic construct; identical to SEQ ID NO: 1576
  REGION 1..2456: note = Description of Artificial Sequence: Synthetic polypeptide

SEQ ID NO: 1582 - protein, 2361 aa, synthetic construct
  REGION 1..2361: note = Description of Artificial Sequence: Synthetic polypeptide
MAEPAGSPTSTEEGTPGSGTASSSPGSSTPSGATGSPGASPGTSSTGSPGKLTRAETGATRRYYLGAVELSWDYMQSDLGELPVDARFPPRVPKSFPFNTSVVYKKTLFVEFTDHLFNIAKPRPPWMGLLGPTIQAEVYDTVVITLKNMASHPVSLHAVGVSYWKASEGAEYDDQTSQREKEDDKVFPGGSHTYVWQVLKENGPMASDPLCLTYSYLSHVDLVKDLNSGLIGALLVCREGSLAKEKTQTLHKFILLFAVFDEGKSWHSETKNSLMQDRDAASARAWPKMHTVNGYVNRSLPGLIGCHRKSVYWHVIGMGTTPEVHSIFLEGHTFLVRNHRQASLEISPITFLTAQTLLMDLGQFLLFCHISSHQHDGMEAYVKVDSCPEEPQLRMKNNEEAEDYDDDLTDSEMDVVRFDDDNSPSFIQIRSVAKKHPKTWVHYIAAEEEDWDYAPLVLAPDDRSYKSQYLNNGPQRIGRKYKKVRFMAYTDETFKTREAIQHESGILGPLLYGEVGDTLLIIFKNQASRPYNIYPHGITDVRPLYSRRLPKGVKHLKDFPILPGEIFKYKWTVTVEDGPTKSDPRCLTRYYSSFVNMERDLASGLIGPLLICYKESVDQRGNQIMSDKRNVILFSVFDENRSWYLTENIQRFLPNPAGVQLEDPEFQASNIMHSINGYVFDSLQLSVCLHEVAYWYILSIGAQTDFLSVFFSGYTFKHKMVYEDTLTLFPFSGETVFMSMENPGLWILGCHNSDFRNRGMTALLKVSSCDKNTGDYYEDSYEDISAYLLSKNNAIEPRSFSQNPPVLKRHQREITRTTLQSDQEEIDYDDTISVEMKKEDFDIYDEDENQSPRSFQKKTRHYFIAAVERLWDYGMSSSPHVLRNRAQSGSVPQFKKVVFQEFTDGSFTQPLYRGELNEHLGLLGPYIRAEVEDNIMVTFRNQASRPYSFYSSLISYEEDQRQGAEPRKNFVKPNETKTYFWKVQHHMAPTKDEFDCKAWAYFSDVDLEKDVHSGLIGPLLVCHTNTLNPAHGRQVTVQEFALFFTIFDETKSWYFTENMERNCRAPCNIQMEDPTFKENYRFHAINGYIMDTLPGLVMAQDQRIRWYLLSMGSNENIHSIHFSGHVFTVRKKEEYKMALYNLYPGVFETVEMLPSKAGIWRVECLIGEHLHAGMSTLFLVYSNKCQTPLGMASGHIRDFQITASGQYGQWAPKLARLHYSGSINAWSTKEPFSWIKVDLLAPMIIHGIKTQGARQKFSSLYISQFIIMYSLDGKKWQTYRGNSTGTLMVFFGNVDSSGIKHNIFNPPIIARYIRLHPTHYSIRSTLRMELMGCDLNSCSMPLGMESKAISDAQITASSYFTNMFATWSPSKARLHLQGRSNAWRPQVNNPKEWLQVDFQKTMKVTGVTTQGVKSLLTSMYVKEFLISSSQDGHQWTLFFQNGKVKVFQGNQDSFTPVVNSLDPPLLTRYLRIHPQSWVHQIALRMEVLGCEAQDLYGGSPAGSPTSTEEGTSESATPESGPGTSTEPSEGSAPGSPAGSPTSTEEGTSTEPSEGSAPGTSTEPSEGSAPGTSESATPESGPGSEPATSGSETPGSEPATSGSETPGSPAGSPTSTEEGTSESATPESGPGTSTEPSEGSAPGTSTEPSEGSAPGSPAGSPTSTEEGTSTEPSEGSAPGTSTEPSEGSAPGTSESATPESGPGTSTEPSEGSAPGTSESATPESGPGSEPATSGSETPGTSTEPSEGSAPGTSTEPSEGSAPGTSESATPESGPGTSESATPESGPGSPAGSPTSTEEGTSESATPESGPGSEPATSGSETPGTSESATPESGPGTSTEPSEGSAPGTSTEPSEGSAPGTSTEPSEGSAPGTSTEPSEGSAPGTSTEPSEGSAPGTSTEPSEGSAPGSPAGSPTSTEEGTSTEPSEGSAPGTSESATPESGPGSEPATSGSETPGTSESATPESGPGSEPATSGSETPGTSESATPESGPGTSTEPSEGSAPGTSESATPESGPGSPAGSPTSTEEGSPAGSPTSTEEGSPAGSPTSTEEGTSESATPESGPGTSTEPSEGSAPGTSESATPESGPGSEPATSGSETPGTSESATPESGPGSEPATSGSETPGTSESATPESGPGTSTEPSEGSAPGSPAGSPTSTEEGTSESATPESGPGSEPATSGSETPGTSESATPESGPGSPAGSPTSTEEGSPAGSPTSTEEGTSTEPSEGSAPGTSESATPESGPGTSESATPESGPGTSESATPESGPGSEPATSGSETPGSEPATSGSETPGSPAGSPTSTEEGTSTEPSEGSAPGTSTEPSEGSAPGSEPATSGSETPGTSESATPESGPGTSTEPSEGSAP

SEQ ID NO: 1583 - protein, 1734 aa, synthetic construct
  REGION 1..1734: note = Description of Artificial Sequence: Synthetic polypeptide
ATRRYYLGAVELSWDYMQSDLGELPVDARFPPRVPKSFPFNTSVVYKKTLFVEFTDHLFNIAKPRPPWMGLLGPTIQAEVYDTVVITLKNMASHPVSLHAVGVSYWKASEGAEYDDQTSQREKEDDKVFPGGSHTYVWQVLKENGPMASDPLCLTYSYLSHVDLVKDLNSGLIGALLVCREGSLAKEKTQTLHKFILLFAVFDEGKSWHSETKNSLMQDRDAASARAWPKMHTVNGYVNRSLPGLIGCHRKSVYWHVIGMGTTPEVHSIFLEGHTFLVRNHRQASLEISPITFLTAQTLLMDLGQFLLFCHISSHQHDGMEAYVKVDSCPEEPQLRMKNNEEAEDYDDDLTDSEMDVVRFDDDNSPSFIQIRSVAKKHPKTWVHYIAAEEEDWDYAPLVLAPDDRSYKSQYLNNGPQRIGRKYKKVRFMAYTDETFKTREAIQHESGILGPLLYGEVGDTLLIIFKNQASRPYNIYPHGITDVRPLYSRRLPKGVKHLKDFPILPGEIFKYKWTVTVEDGPTKSDPRCLTRYYSSFVNMERDLASGLIGPLLICYKESVDQRGNQIMSDKRNVILFSVFDENRSWYLTENIQRFLPNPAGVQLEDPEFQASNIMHSINGYVFDSLQLSVCLHEVAYWYILSIGAQTDFLSVFFSGYTFKHKMVYEDTLTLFPFSGETVFMSMENPGLWILGCHNSDFRNRGMTALLKVSSCDKNTGDYYEDSYEDISAYLLSKNNAIEPRSFSQNPPVLKRHQREITRTTLQSDQEEIDYDDTISVEMKKEDFDIYDEDENQSPRSFQKKTRHYFIAAVERLWDYGMSSSPHVLRNRAQSGSVPQFKKVVFQEFTDGSFTQPLYRGELNEHLGLLGPYIRAEVEDNIMVTFRNQASRPYSFYSSLISYEEDQRQGAEPRKNFVKPNETKTYFWKVQHHMAPTKDEFDCKAWAYFSDVDLEKDVHSGLIGPLLVCHTNTLNPAHGRQVTVQEFALFFTIFDETKSWYFTENMERNCRAPCNIQMEDPTFKENYRFHAINGYIMDTLPGLVMAQDQRIRWYLLSMGSNENIHSIHFSGHVFTVRKKEEYKMALYNLYPGVFETVEMLPSKAGIWRVECLIGEHLHAGMSTLFLVYSNKCQTPLGMASGHIRDFQITASGQYGQWAPKLARLHYSGSINAWSTKEPFSWIKVDLLAPMIIHGIKTQGARQKFSSLYISQFIIMYSLDGKKWQTYRGNSTGTLMVFFGNVDSSGIKHNIFNPPIIARYIRLHPTHYSIRSTLRMELMGCDLNSCSMPLGMESKAISDAQITASSYFTNMFATWSPSKARLHLQGRSNAWRPQVNNPKEWLQVDFQKTMKVTGVTTQGVKSLLTSMYVKEFLISSSQDGHQWTLFFQNGKVKVFQGNQDSFTPVVNSLDPPLLTRYLRIHPQSWVHQIALRMEVLGCEAQDLYKLTRAETGPGASPGTSSTGSPGASPGTSSTGSPGTPGSGTASSSPGSSTPSGATGSPGTPGSGTASSSPGSSTPSGATGSPGTPGSGTASSSPGSSTPSGATGSPGSSTPSGATGSPGSSPSASTGTGPGSSPSASTGTGPGASPGTSSTGSPGTPGSGTASSSPGSSTPSGATGSPGSSPSASTGTGPGSSPSASTGTGPGASPGTSSTGSPGASPGTSSTGSPGSSTPSGATGSPGSSPSASTGTGPGASPGTSSTGSPGSSPSASTGTGPGTPGSGTASSSPGSSTPSGATGS

SEQ ID NO: 1584 - protein, 2310 aa, synthetic construct [sequence omitted]

SEQ ID NO: 1585 - protein, 2599 aa, synthetic construct
  REGION 1..2599: note = Description of Artificial Sequence: Synthetic polypeptide
ATRRYYLGAVELSWDYMQSDLGELPVDARFPPRVPKSFPFNTSVVYKKTLFVEFTDHLFNIAKPRPPWMGLLGPTIQAEVYDTVVITLKNMASHPVSLHAVGVSYWKASEGAEYDDQTSQREKEDDKVFPGGSHTYVWQVLKENGPMASDPLCLTYSYLSHVDLVKDLNSGLIGALLVCREGSLAKEKTQTLHKFILLFAVFDEGKSWHSETKNSLMQDRDAASARAWPKMHTVNGYVNRSLPGLIGCHRKSVYWHVIGMGTTPEVHSIFLEGHTFLVRNHRQASLEISPITFLTAQTLLMDLGQFLLFCHISSHQHDGMEAYVKVDSCPEEPQLRMKNNEEAEDYDDDLTDSEMDVVRFDDDNSPSFIQIRSVAKKHPKTWVHYIAAEEEDWDYAPLVLAPDDRSYKSQYLNNGPQRIGRKYKKVRFMAYTDETFKTREAIQHESGILGPLLYGEVGDTLLIIFKNQASRPYNIYPHGITDVRPLYSRRLPKGVKHLKDFPILPGEIFKYKWTVTVEDGPTKSDPRCLTRYYSSFVNMERDLASGLIGPLLICYKESVDQRGNQIMSDKRNVILFSVFDENRSWYLTENIQRFLPNPAGVQLEDPEFQASNIMHSINGYVFDSLQLSVCLHEVAYWYILSIGAQTDFLSVFFSGYTFKHKMVYEDTLTLFPFSGETVFMSMENPGLWILGCHNSDFRNRGMTALLKVSSCDKNTGDYYEDSYEDISAYLLSKNNAIEPRSFSQNGPGASPGTSSTGSPGASPGTSSTGSPGTPGSGTASSSPGSSTPSGATGSPGTPGSGTASSSPGSSTPSGATGSPGTPGSGTASSSPGSSTPSGATGSPGSSTPSGATGSPGSSPSASTGTGPGSSPSASTGTGPGASPGTSSTGSPGTPGSGTASSSPGSSTPSGATGSPGSSPSASTGTGPGSSPSASTGTGPGASPGTSSTGSPGASPGTSSTGSPGSSTPSGATGSPGSSPSASTGTGPGASPGTSSTGSPGSSPSASTGTGPGTPGSGTASSSPGSSTPSGATGSPPVLKRHQREITRTTLQSDQEEIDYDDTISVEMKKEDFDIYDEDENQSPRSFQKKTRHYFIAAVERLWDYGMSSSPHVLRNRAQSGSVPQFKKVVFQEFTDGSFTQPLYRGELNEHLGLLGPYIRAEVEDNIMVTFRNQASRPYSFYSSLISYEEDQRQGAEPRKNFVKPNETKTYFWKVQHHMAPTKDEFDCKAWAYFSDVDLEKDVHSGLIGPLLVCHTNTLNPAHGRQVTVQEFALFFTIFDETKSWYFTENMERNCRAPCNIQMEDPTFKENYRFHAINGYIMDTLPGLVMAQDQRIRWYLLSMGSNENIHSIHFSGHVFTVRKKEEYKMALYNLYPGVFETVEMLPSKAGIWRVECLIGEHLHAGMSTLFLVYSNKCQTPLGMASGHIRDFQITASGQYGQWAPKLARLHYSGSINAWSTKEPFSWIKVDLLAPMIIHGIKTQGARQKFSSLYISQFIIMYSLDGKKWQTYRGNSTGTLMVFFGNVDSSGIKHNIFNPPIIARYIRLHPTHYSIRSTLRMELMGCDLNSCSMPLGMESKAISDAQITASSYFTNMFATWSPSKARLHLQGRSNAWRPQVNNPKEWLQVDFQKTMKVTGVTTQGVKSLLTSMYVKEFLISSSQDGHQWTLFFQNGKVKVFQGNQDSFTPVVNSLDPPLLTRYLRIHPQSWVHQIALRMEVLGCEAQDLYKLTRAETGGASPGTSSTGSPGSSPSASTGTGPGSSPSASTGTGPGTPGSGTASSSPGSSTPSGATGSPGSSPSASTGTGPGASPGTSSTGSPGTPGSGTASSSPGSSTPSGATGSPGTPGSGTASSSPGASPGTSSTGSPGASPGTSSTGSPGTPGSGTASSSPGSSTPSGATGSPGASPGTSSTGSPGTPGSGTASSSPGSSTPSGATGSPGSSPSASTGTGPGSSPSASTGTGPGSSTPSGATGSPGSSTPSGATGSPGASPGTSSTGSPGASPGTSSTGSPGASPGTSSTGSPGTPGSGTASSSPGASPGTSSTGSPGASPGTSSTGSPGASPGTSSTGSPGSSPSASTGTGPGTPGSGTASSSPGASPGTSSTGSPGASPGTSSTGSPGASPGTSSTGSPGSSTPSGATGSPGSSTPSGATGSPGASPGTSSTGSPGTPGSGTASSSPGSSTPSGATGSPGSSTPSGATGSPGSSTPSGATGSPGSSPSASTGTGPGASPGTSSTGSPGASPGTSSTGSPGTPGSGTASSSPGASPGTSSTGSPGASPGTSSTGSPGASPGTSSTGSPGASPGTSSTGSPGTPGSGTASSSPGSSTPSGATGSPGTPGSGTASSSPGSSTPSGATGSPGTPGSGTASSSPGSSTPSGATGSPGSSTPSGATGSPGSSPSASTGTGPGSSPSASTGTGPGASPGTSSTGSPGTPGSGTASSSPGSSTPSGATGSPGSSPSASTGTGPGSSPSASTGTGPGASPGTSSTGSPGASPGTSSTGSPGSSTPSGATGSPGSSPSASTGTGPGASPGTSSTGSPGSSPSASTGTGPGTPGSGTASSSPGSSTPSGATGSPGSSTPSGATGSPGASPGTSSTGSP

SEQ ID NO: 1586 - protein, 2599 aa, synthetic construct
  REGION 1..2599: note = Description of Artificial Sequence: Synthetic polypeptide
ATRRYYLGAVELSWDYMQSDLGELPVDARFPPRVPKSFPFNTSVVYKKTLFVEFTDHLFNIAKPRPPWMGLLGPTIQAEVYDTVVITLKNMASHPVSLHAVGVSYWKASEGAEYDDQTSQREKEDDKVFPGGSHTYVWQVLKENGPMASDPLCLTYSYLSHVDLVKDLNSGLIGALLVCREGSLAKEKTQTLHKFILLFAVFDEGKSWHSETKNSLMQDRDAASARAWPKMHTVNGYVNRSLPGLIGCHRKSVYWHVIGMGTTPEVHSIFLEGHTFLVRNHRQASLEISPITFLTAQTLLMDLGQFLLFCHISSHQHDGMEAYVKVDSCPEEPQLRMKNNEEAEDYDDDLTDSEMDVVRFDDDNSPSFIQIRSVAKKHPKTWVHYIAAEEEDWDYAPLVLAPDDRSYKSQYLNNGPQRIGRKYKKVRFMAYTDETFKTREAIQHESGILGPLLYGEVGDTLLIIFKNQASRPYNIYPHGITDVRPLYSRRLPKGVKHLKDFPILPGEIFKYKWTVTVEDGPTKSDPRCLTRYYSSFVNMERDLASGLIGPLLICYKESVDQRGNQIMSDKRNVILFSVFDENRSWYLTENIQRFLPNPAGVQLEDPEFQASNIMHSINGYVFDSLQLSVCLHEVAYWYILSIGAQTDFLSVFFSGYTFKHKMVYEDTLTLFPFSGETVFMSMENPGLWILGCHNSDFRNRGMTALLKVSSCDKNTGDYYEDSYEDISAYLLSKNNAIEPRSFSGPGASPGTSSTGSPGASPGTSSTGSPGTPGSGTASSSPGSSTPSGATGSPGTPGSGTASSSPGSSTPSGATGSPGTPGSGTASSSPGSSTPSGATGSPGSSTPSGATGSPGSSPSASTGTGPGSSPSASTGTGPGASPGTSSTGSPGTPGSGTASSSPGSSTPSGATGSPGSSPSASTGTGPGSSPSASTGTGPGASPGTSSTGSPGASPGTSSTGSPGSSTPSGATGSPGSSPSASTGTGPGASPGTSSTGSPGSSPSASTGTGPGTPGSGTASSSPGSSTPSGATGSQNPPVLKRHQREITRTTLQSDQEEIDYDDTISVEMKKEDFDIYDEDENQSPRSFQKKTRHYFIAAVERLWDYGMSSSPHVLRNRAQSGSVPQFKKVVFQEFTDGSFTQPLYRGELNEHLGLLGPYIRAEVEDNIMVTFRNQASRPYSFYSSLISYEEDQRQGAEPRKNFVKPNETKTYFWKVQHHMAPTKDEFDCKAWAYFSDVDLEKDVHSGLIGPLLVCHTNTLNPAHGRQVTVQEFALFFTIFDETKSWYFTENMERNCRAPCNIQMEDPTFKENYRFHAINGYIMDTLPGLVMAQDQRIRWYLLSMGSNENIHSIHFSGHVFTVRKKEEYKMALYNLYPGVFETVEMLPSKAGIWRVECLIGEHLHAGMSTLFLVYSNKCQTPLGMASGHIRDFQITASGQYGQWAPKLARLHYSGSINAWSTKEPFSWIKVDLLAPMIIHGIKTQGARQKFSSLYISQFIIMYSLDGKKWQTYRGNSTGTLMVFFGNVDSSGIKHNIFNPPIIARYIRLHPTHYSIRSTLRMELMGCDLNSCSMPLGMESKAISDAQITASSYFTNMFATWSPSKARLHLQGRSNAWRPQVNNPKEWLQVDFQKTMKVTGVTTQGVKSLLTSMYVKEFLISSSQDGHQWTLFFQNGKVKVFQGNQDSFTPVVNSLDPPLLTRYLRIHPQSWVHQIALRMEVLGCEAQDLYKLTRAETGGASPGTSSTGSPGSSPSASTGTGPGSSPSASTGTGPGTPGSGTASSSPGSSTPSGATGSPGSSPSASTGTGPGASPGTSSTGSPGTPGSGTASSSPGSSTPSGATGSPGTPGSGTASSSPGASPGTSSTGSPGASPGTSSTGSPGTPGSGTASSSPGSSTPSGATGSPGASPGTSSTGSPGTPGSGTASSSPGSSTPSGATGSPGSSPSASTGTGPGSSPSASTGTGPGSSTPSGATGSPGSSTPSGATGSPGASPGTSSTGSPGASPGTSSTGSPGASPGTSSTGSPGTPGSGTASSSPGASPGTSSTGSPGASPGTSSTGSPGASPGTSSTGSPGSSPSASTGTGPGTPGSGTASSSPGASPGTSSTGSPGASPGTSSTGSPGASPGTSSTGSPGSSTPSGATGSPGSSTPSGATGSPGASPGTSSTGSPGTPGSGTASSSPGSSTPSGATGSPGSSTPSGATGSPGSSTPSGATGSPGSSPSASTGTGPGASPGTSSTGSPGASPGTSSTGSPGTPGSGTASSSPGASPGTSSTGSPGASPGTSSTGSPGASPGTSSTGSPGASPGTSSTGSPGTPGSGTASSSPGSSTPSGATGSPGTPGSGTASSSPGSSTPSGATGSPGTPGSGTASSSPGSSTPSGATGSPGSSTPSGATGSPGSSPSASTGTGPGSSPSASTGTGPGASPGTSSTGSPGTPGSGTASSSPGSSTPSGATGSPGSSPSASTGTGPGSSPSASTGTGPGASPGTSSTGSPGASPGTSSTGSPGSSTPSGATGSPGSSPSASTGTGPGASPGTSSTGSPGSSPSASTGTGPGTPGSGTASSSPGSSTPSGATGSPGSSTPSGATGSPGASPGTSSTGSP

SEQ ID NO: 1587 - protein, 2599 aa, synthetic construct
  REGION 1..2599: note = Description of Artificial Sequence: Synthetic polypeptide
ATRRYYLGAVELSWDYMQSDLGELPVDARFPPRVPKSFPFNTSVVYKKTLFVEFTDHLFNIAKPRPPWMGLLGPTIQAEVYDTVVITLKNMASHPVSLHAVGVSYWKASEGAEYDDQTSQREKEDDKVFPGGSHTYVWQVLKENGPMASDPLCLTYSYLSHVDLVKDLNSGLIGALLVCREGSLAKEKTQTLHKFILLFAVFDEGKSWHSETKNSLMQDRDAASARAWPKMHTVNGYVNRSLPGLIGCHRKSVYWHVIGMGTTPEVHSIFLEGHTFLVRNHRQASLEISPITFLTAQTLLMDLGQFLLFCHISSHQHDGMEAYVKVDSCPEEPQLRMKNNEEAEDYDDDLTDSEMDVVRFDDDNSPSFIQIRSVAKKHPKTWVHYIAAEEEDWDYAPLVLAPDDRSYKSQYLNNGPQRIGRKYKKVRFMAYTDETFKTREAIQHESGILGPLLYGEVGDTLLIIFKNQASRPYNIYPHGITDVRPLYSRRLPKGVKHLKDFPILPGEIFKYKWTVTVEDGPTKSDPRCLTRYYSSFVNMERDLASGLIGPLLICYKESVDQRGNQIMSDKRNVILFSVFDENRSWYLTENIQRFLPNPAGVQLEDPEFQASNIMHSINGYVFDSLQLSVCLHEVAYWYILSIGAQTDFLSVFFSGYTFKHKMVYEDTLTLFPFSGETVFMSMENPGLWILGCHNSDFRNRGMTALLKVSSCDKNTGDYYEDSYEDISAYLLSKNNAIEPRSFSQNGPGASPGTSSTGSPGASPGTSSTGSPGTPGSGTASSSPGSSTPSGATGSPGTPGSGTASSSPGSSTPSGATGSPGTPGSGTASSSPGSSTPSGATGSPGSSTPSGATGSPGSSPSASTGTGPGSSPSASTGTGPGASPGTSSTGSPGTPGSGTASSSPGSSTPSGATGSPGSSPSASTGTGPGSSPSASTGTGPGASPGTSSTGSPGASPGTSSTGSPGSSTPSGATGSPGSSPSASTGTGPGASPGTSSTGSPGSSPSASTGTGPGTPGSGTASSSPGSSTPSGATGSPPVLKRHQAEITRTTLQSDQEEIDYDDTISVEMKKEDFDIYDEDENQSPRSFQKKTRHYFIAAVERLWDYGMSSSPHVLRNRAQSGSVPQFKKVVFQEFTDGSFTQPLYRGELNEHLGLLGPYIRAEVEDNIMVTFRNQASRPYSFYSSLISYEEDQRQGAEPRKNFVKPNETKTYFWKVQHHMAPTKDEFDCKAWAYFSDVDLEKDVHSGLIGPLLVCHTNTLNPAHGRQVTVQEFALFFTIFDETKSWYFTENMERNCRAPCNIQMEDPTFKENYRFHAINGYIMDTLPGLVMAQDQRIRWYLLSMGSNENIHSIHFSGHVFTVRKKEEYKMALYNLYPGVFETVEMLPSKAGIWRVECLIGEHLHAGMSTLFLVYSNKCQTPLGMASGHIRDFQITASGQYGQWAPKLARLHYSGSINAWSTKEPFSWIKVDLLAPMIIHGIKTQGARQKFSSLYISQFIIMYSLDGKKWQTYRGNSTGTLMVFFGNVDSSGIKHNIFNPPIIARYIRLHPTHYSIRSTLRMELMGCDLNSCSMPLGMESKAISDAQITASSYFTNMFATWSPSKARLHLQGRSNAWRPQVNNPKEWLQVDFQKTMKVTGVTTQGVKSLLTSMYVKEFLISSSQDGHQWTLFFQNGKVKVFQGNQDSFTPVVNSLDPPLLTRYLRIHPQSWVHQIALRMEVLGCEAQDLYKLTRAETGGASPGTSSTGSPGSSPSASTGTGPGSSPSASTGTGPGTPGSGTASSSPGSSTPSGATGSPGSSPSASTGTGPGASPGTSSTGSPGTPGSGTASSSPGSSTPSGATGSPGTPGSGTASSSPGASPGTSSTGSPGASPGTSSTGSPGTPGSGTASSSPGSSTPSGATGSPGASPGTSSTGSPGTPGSGTASSSPGSSTPSGATGSPGSSPSASTGTGPGSSPSASTGTGPGSSTPSGATGSPGSSTPSGATGSPGASPGTSSTGSPGASPGTSSTGSPGASPGTSSTGSPGTPGSGTASSSPGASPGTSSTGSPGASPGTSSTGSPGASPGTSSTGSPGSSPSASTGTGPGTPGSGTASSSPGASPGTSSTGSPGASPGTSSTGSPGASPGTSSTGSPGSSTPSGATGSPGSSTPSGATGSPGASPGTSSTGSPGTPGSGTASSSPGSSTPSGATGSPGSSTPSGATGSPGSSTPSGATGSPGSSPSASTGTGPGASPGTSSTGSPGASPGTSSTGSPGTPGSGTASSSPGASPGTSSTGSPGASPGTSSTGSPGASPGTSSTGSPGASPGTSSTGSPGTPGSGTASSSPGSSTPSGATGSPGTPGSGTASSSPGSSTPSGATGSPGTPGSGTASSSPGSSTPSGATGSPGSSTPSGATGSPGSSPSASTGTGPGSSPSASTGTGPGASPGTSSTGSPGTPGSGTASSSPGSSTPSGATGSPGSSPSASTGTGPGSSPSASTGTGPGASPGTSSTGSPGASPGTSSTGSPGSSTPSGATGSPGSSPSASTGTGPGASPGTSSTGSPGSSPSASTGTGPGTPGSGTASSSPGSSTPSGATGSPGSSTPSGATGSPGASPGTSSTGSP

SEQ ID NO: 1588 - protein, 1763 aa, synthetic construct
  REGION 1..1763: note = Description of Artificial Sequence: Synthetic polypeptide
ATRRYYLGAVELSWDYMQSDLGELPVDARFPPRVPKSFPFNTSVVYKKTLFVEFTDHLFNIAKPRPPWMGLLGPTIQAEVYDTVVITLKNMASHPVSLHAVGVSYWKASEGAEYDDQTSQREKEDDKVFPGGSHTYVWQVLKENGPMASDPLCLTYSYLSHVDLVKDLNSGLIGALLVCREGSLAKEKTQTLHKFILLFAVFDEGKSWHSETKNSLMQDRDAASARAWPKMHTVNGYVNRSLPGLIGCHRKSVYWHVIGMGTTPEVHSIFLEGHTFLVRNHRQASLEISPITFLTAQTLLMDLGQFLLFCHISSHQHDGMEAYVKVDSCPEEPQLRMKNNEEAEDYDDDLTDSEMDVVRFDDDNSPSFIQIRSVAKKHPKTWVHYIAAEEEDWDYAPLVLAPDDRSYKSQYLNNGPQRIGRKYKKVRFMAYTDETFKTREAIQHESGILGPLLYGEVGDTLLIIFKNQASRPYNIYPHGITDVRPLYSRRLPKGVKHLKDFPILPGEIFKYKWTVTVEDGPTKSDPRCLTRYYSSFVNMERDLASGLIGPLLICYKESVDQRGNQIMSDKRNVILFSVFDENRSWYLTENIQRFLPNPAGVQLEDPEFQASNIMHSINGYVFDSLQLSVCLHEVAYWYILSIGAQTDFLSVFFSGYTFKHKMVYEDTLTLFPFSGETVFMSMENPGLWILGCHNSDFRNRGMTALLKVSSCDKNTGDYYEDSYEDISAYLLSKNNAIEPRSFSQNPPVLKRHQAEITRTTLQSDQEEIDYDDTISVEMKKEDFDIYDEDENQSPRSFQKKTRHYFIAAVERLWDYGMSSSPHVLRNRAQSGSVPQFKKVVFQEFTDGSFTQPLYRGELNEHLGLLGPYIRAEVEDNIMVTFRNQASRPYSFYSSLISYEEDQRQGAEPRKNFVKPNETKTYFWKVQHHMAPTKDEFDCKAWAYFSDVDLEKDVHSGLIGPLLVCHTNTLNPAHGRQVTVQEFALFFTIFDETKSWYFTENMERNCRAPCNIQMEDPTFKENYRFHAINGYIMDTLPGLVMAQDQRIRWYLLSMGSNENIHSIHFSGHVFTVRKKEEYKMALYNLYPGVFETVEMLPSKAGIWRVECLIGEHLHAGMSTLFLVYSNKCQTPLGMASGHIRDFQITASGQYGQWAPKLARLHYSGSINAWSTKEPFSWIKVDLLAPMIIHGIKTQGARQKFSSLYISQFIIMYSLDGKKWQTYRGNSTGTLMVFFGNVDSSGIKHNIFNPPIIARYIRLHPTHYSIRSTLRMELMGCDLNSCSMPLGMESKAISDAQITASSYFTNMFATWSPSKARLHLQGRSNAWRPQVNNPKEWLQVDFQKTMKVTGVTTQGVKSLLTSMYVKEFLISSSQDGHQWTLFFQNGKVKVFQGNQDSFTPVVNSLDPPLLTRYLRIHPQSWVHQIALRMEVLGCEAQDLYKLTRAETGAGSPGAETAPGASPGTSSTGSPGASPGTSSTGSPGTPGSGTASSSPGSSTPSGATGSPGTPGSGTASSSPGSSTPSGATGSPGTPGSGTASSSPGSSTPSGATGSPGSSTPSGATGSPGSSPSASTGTGPGSSPSASTGTGPGASPGTSSTGSPGTPGSGTASSSPGSSTPSGATGSPGSSPSASTGTGPGSSPSASTGTGPGASPGTSSTGSPGASPGTSSTGSPGSSTPSGATGSPGSSPSASTGTGPGASPGTSSTGSPGSSPSASTGTGPGTPGSGTASSSPGSSTPSGATGSGAETAEQKLISEEDLSPATG

SEQ ID NO: 1589 - protein, 2310 aa, synthetic construct [sequence omitted]

SEQ ID NO: 1590 - protein, 2310 aa, synthetic construct
  REGION 1..2310: note = Description of Artificial Sequence: Synthetic polypeptide
ATRRYYLGAVELSWDYMQSDLGELPVDARFPPRVPKSFPFNTSVVYKKTLFVEFTDHLFNIAKPRPPWMGLLGPTIQAEVYDTVVITLKNMASHPVSLHAVGVSYWKASEGAEYDDQTSQREKEDDKVFPGGSHTYVWQVLKENGPMASDPLCLTYSYLSHVDLVKDLNSGLIGALLVCREGSLAKEKTQTLHKFILLFAVFDEGKSWHSETKNSLMQDRDAASARAWPKMHTVNGYVNRSLPGLIGCHRKSVYWHVIGMGTTPEVHSIFLEGHTFLVRNHRQASLEISPITFLTAQTLLMDLGQFLLFCHISSHQHDGMEAYVKVDSCPEEPQLRMKNNEEAEDYDDDLTDSEMDVVRFDDDNSPSFIQIRSVAKKHPKTWVHYIAAEEEDWDYAPLVLAPDDRSYKSQYLNNGPQRIGRKYKKVRFMAYTDETFKTREAIQHESGILGPLLYGEVGDTLLIIFKNQASRPYNIYPHGITDVRPLYSRRLPKGVKHLKDFPILPGEIFKYKWTVTVEDGPTKSDPRCLTRYYSSFVNMERDLASGLIGPLLICYKESVDQRGNQIMSDKRNVILFSVFDENRSWYLTENIQRFLPNPAGVQLEDPEFQASNIMHSINGYVFDSLQLSVCLHEVAYWYILSIGAQTDFLSVFFSGYTFKHKMVYEDTLTLFPFSGETVFMSMENPGLWILGCHNSDFRNRGMTALLKVSSCDKNTGDYYEDSYEDISAYLLSKNNAIEPRSFSQNPPVLKRHQAEITRTTLQSDQEEIDYDDTISVEMKKEDFDIYDEDENQSPRSFQKKTRHYFIAAVERLWDYGMSSSPHVLRNRAQSGSVPQFKKVVFQEFTDGSFTQPLYRGELNEHLGLLGPYIRAEVEDNIMVTFRNQASRPYSFYSSLISYEEDQRQGAEPRKNFVKPNETKTYFWKVQHHMAPTKDEFDCKAWAYFSDVDLEKDVHSGLIGPLLVCHTNTLNPAHGRQVTVQEFALFFTIFDETKSWYFTENMERNCRAPCNIQMEDPTFKENYRFHAINGYIMDTLPGLVMAQDQRIRWYLLSMGSNENIHSIHFSGHVFTVRKKEEYKMALYNLYPGVFETVEMLPSKAGIWRVECLIGEHLHAGMSTLFLVYSNKCQTPLGMASGHIRDFQITASGQYGQWAPKLARLHYSGSINAWSTKEPFSWIKVDLLAPMIIHGIKTQGARQKFSSLYISQFIIMYSLDGKKWQTYRGNSTGTLMVFFGNVDSSGIKHNIFNPPIIARYIRLHPTHYSIRSTLRMELMGCDLNSCSMPLGMESKAISDAQITASSYFTNMFATWSPSKARLHLQGRSNAWRPQVNNPKEWLQVDFQKTMKVTGVTTQGVKSLLTSMYVKEFLISSSQDGHQWTLFFQNGKVKVFQGNQDSFTPVVNSLDPPLLTRYLRIHPQSWVHQIALRMEVLGCEAQDLYKLTRAETGGSPAGSPTSTEEGTSESATPESGPGTSTEPSEGSAPGSPAGSPTSTEEGTSTEPSEGSAPGTSTEPSEGSAPGTSESATPESGPGSEPATSGSETPGSEPATSGSETPGSPAGSPTSTEEGTSESATPESGPGTSTEPSEGSAPGTSTEPSEGSAPGSPAGSPTSTEEGTSTEPSEGSAPGTSTEPSEGSAPGTSESATPESGPGTSTEPSEGSAPGTSESATPESGPGSEPATSGSETPGTSTEPSEGSAPGTSTEPSEGSAPGTSESATPESGPGTSESATPESGPGSPAGSPTSTEEGTSESATPESGPGSEPATSGSETPGTSESATPESGPGTSTEPSEGSAPGTSTEPSEGSAPGTSTEPSEGSAPGTSTEPSEGSAPGTSTEPSEGSAPGTSTEPSEGSAPGSPAGSPTSTEEGTSTEPSEGSAPGTSESATPESGPGSEPATSGSETPGTSESATPESGPGSEPATSGSETPGTSESATPESGPGTSTEPSEGSAPGTSESATPESGPGSPAGSPTSTEEGSPAGSPTSTEEGSPAGSPTSTEEGTSESATPESGPGTSTEPSEGSAPGTSESATPESGPGSEPATSGSETPGTSESATPESGPGSEPATSGSETPGTSESATPESGPGTSTEPSEGSAPGSPAGSPTSTEEGTSESATPESGPGSEPATSGSETPGTSESATPESGPGSPAGSPTSTEEGSPAGSPTSTEEGTSTEPSEGSAPGTSESATPESGPGTSESATPESGPGTSESATPESGPGSEPATSGSETPGSEPATSGSETPGSPAGSPTSTEEGTSTEPSEGSAPGTSTEPSEGSAPGSEPATSGSETPGTSESATPESGPGTSTEPSEGSAP

SEQ ID NO: 1591 - protein, 11 aa, synthetic construct
  REGION 1..11: note = Description of Artificial Sequence: Synthetic peptide
ASTGETGETGE

SEQ ID NO: 1592 - protein, 2332 aa, synthetic construct; identical to SEQ ID NO: 2
  REGION 1..2332: note = Description of Artificial Sequence: Synthetic polypeptide

SEQ ID NO: 1593 - protein, 1438 aa, synthetic construct; identical to SEQ ID NO: 7
  REGION 1..1438: note = Description of Artificial Sequence: Synthetic polypeptide

SEQ ID NO: 1594 - protein, 1438 aa, synthetic construct; identical to SEQ ID NO: 7
  REGION 1..1438: note = Description of Artificial Sequence: Synthetic polypeptide

SEQ ID NO: 1595 - protein, 1438 aa, synthetic construct; identical to SEQ ID NO: 7
  REGION 1..1438: note = Description of Artificial Sequence: Synthetic polypeptide

SEQ ID NO: 1596 - protein, 864 aa, synthetic construct; identical to SEQ ID NO: 92
  REGION 1..864: note = Description of Artificial Sequence: Synthetic polypeptide

SEQ ID NO: 1597 - protein, 576 aa, synthetic construct; identical to SEQ ID NO: 87
  REGION 1..576: note = Description of Artificial Sequence: Synthetic polypeptide

SEQ ID NO: 1598 - protein, 864 aa, synthetic construct; identical to SEQ ID NO: 92
  REGION 1..864: note = Description of Artificial Sequence: Synthetic polypeptide

SEQ ID NO: 1599 - protein, 288 aa, synthetic construct; identical to SEQ ID NO: 80
  REGION 1..288: note = Description of Artificial Sequence: Synthetic polypeptide

SEQ ID NO: 1600 - protein, 864 aa, synthetic construct; identical to SEQ ID NO: 92
  REGION 1..864: note = Description of Artificial Sequence: Synthetic polypeptide

SEQ ID NO: 1601 - protein, 144 aa, synthetic construct; identical to SEQ ID NO: 71
  REGION 1..144: note = Description of Artificial Sequence: Synthetic polypeptide

SEQ ID NO: 1602 - protein, 864 aa, synthetic construct; identical to SEQ ID NO: 90
  REGION 1..864: note = Description of Artificial Sequence: Synthetic polypeptide

SEQ ID NO: 1603 - protein, 576 aa, synthetic construct; identical to SEQ ID NO: 85
  REGION 1..576: note = Description of Artificial Sequence: Synthetic polypeptide

SEQ ID NO: 1604 - protein, 864 aa, synthetic construct; identical to SEQ ID NO: 90
  REGION 1..864: note = Description of Artificial Sequence: Synthetic polypeptide

SEQ ID NO: 1605 - protein, 288 aa, synthetic construct; identical to SEQ ID NO: 78
  REGION 1..288: note = Description of Artificial Sequence: Synthetic polypeptide

SEQ ID NO: 1606 - protein, 864 aa, synthetic construct; identical to SEQ ID NO: 90
  REGION 1..864: note = Description of Artificial Sequence: Synthetic polypeptide

SEQ ID NO: 1607 - protein, 144 aa, synthetic construct; identical to SEQ ID NO: 60
  REGION 1..144: note = Description of Artificial Sequence: Synthetic polypeptide

SEQ ID NO: 1608 - protein, 144 aa, synthetic construct; identical to SEQ ID NO: 61
  REGION 1..144: note = Description of Artificial Sequence: Synthetic polypeptide

SEQ ID NO: 1609 - protein, 144 aa, synthetic construct; identical to SEQ ID NO: 63
  REGION 1..144: note = Description of Artificial Sequence: Synthetic polypeptide

SEQ ID NO: 1610 - protein, 144 aa, synthetic construct; identical to SEQ ID NO: 65
  REGION 1..144: note = Description of Artificial Sequence: Synthetic polypeptide

SEQ ID NO: 1611 - protein, 19 aa, Homo sapiens
MQIELSTCFFLCLLRFCFS

SEQ ID NO: 1612 - protein, 6 aa, synthetic construct
  REGION 1..6: note = Description of Artificial Sequence: Synthetic peptide
GPEGPS

SEQ ID NO: 1613 - DNA, 57 bp, synthetic construct
  misc_feature 1..57: note = Description of Artificial Sequence: Synthetic oligonucleotide
  source 1..57: mol_type = other DNA
atgcaaatagagctctccacctgcttctttctgtgccttttgcgattctgctttagt

SEQ ID NO: 1614 - protein, 14 aa, synthetic construct
  REGION 1..14: note = Description of Artificial Sequence: Synthetic peptide
SFSQNPPVLKRHQR

SEQ ID NO: 1615 - protein, 11 aa, synthetic construct
  REGION 1..11: note = Description of Artificial Sequence: Synthetic peptide
QNPPVLKRHQR

SEQ ID NO: 1616 - protein, 5 aa, synthetic construct
  REGION 1..5: note = Description of Artificial Sequence: Synthetic peptide
SFSQN

SEQ ID NO: 1617 - protein, 9 aa, synthetic construct
  REGION 1..9: note = Description of Artificial Sequence: Synthetic peptide
PPVLKRHQR

SEQ ID NO: 1618 - protein, 8 aa, synthetic construct
  REGION 1..8: note = Description of Artificial Sequence: Synthetic peptide
LTPRSLLV

SEQ ID NO: 1619 - DNA, 36 bp, synthetic construct
  misc_feature 1..36: note = Description of Artificial Sequence: Synthetic oligonucleotide
  source 1..36: mol_type = other DNA
aggtgaatctccdggtggytcyagcggttcygartc

SEQ ID NO: 1620 - DNA, 36 bp, synthetic construct
  misc_feature 1..36: note = Description of Artificial Sequence: Synthetic oligonucleotide
  source 1..36: mol_type = other DNA
acctgaytcrgaaccgctrgarccacchggagattc

SEQ ID NO: 1621 - DNA, 36 bp, synthetic construct
  misc_feature 1..36: note = Description of Artificial Sequence: Synthetic oligonucleotide
  source 1..36: mol_type = other DNA
aggtagcgaaggttcttcyggtccdggygartcytc

SEQ ID NO: 1622 - DNA, 36 bp, synthetic construct
  misc_feature 1..36: note = Description of Artificial Sequence: Synthetic oligonucleotide
  source 1..36: mol_type = other DNA
acctgargaytcrcchggaccrgaagaaccttcgct

SEQ ID NO: 1623 - DNA, 36 bp, synthetic construct
  misc_feature 1..36: note = Description of Artificial Sequence: Synthetic oligonucleotide
  source 1..36: mol_type = other DNA
aggttcytcygaaagcggttcttcygarggyggtcc

SEQ ID NO: 1624 - DNA, 36 bp, synthetic construct
  misc_feature 1..36: note = Description of Artificial Sequence: Synthetic oligonucleotide
  source 1..36: mol_type = other DNA
acctggaccrccytcrgaagaaccgctttcrgarga

SEQ ID NO: 1625 - DNA, 36 bp, synthetic construct
  misc_feature 1..36: note = Description of Artificial Sequence: Synthetic oligonucleotide
  source 1..36: mol_type = other DNA
aggttcyggtggygaaccdtcygartctggtagctc

SEQ ID NO: 1626 - DNA, 24 bp, synthetic construct
  misc_feature 1..24: note = Description of Artificial Sequence: Synthetic oligonucleotide
  source 1..24: mol_type = other DNA
aggttcgtcttcactcgagggtac

SEQ ID NO: 1627 - DNA, 16 bp, synthetic construct
  misc_feature 1..16: note = Description of Artificial Sequence: Synthetic oligonucleotide
  source 1..16: mol_type = other DNA
cctcgagtgaagacga

SEQ ID NO: 1628 - DNA, 36 bp, synthetic construct
  misc_feature 1..36: note = Description of Artificial Sequence: Synthetic oligonucleotide
  source 1..36: mol_type = other DNA
aggtagcccdgcwggytctccdacytcyacygarga

SEQ ID NO: 1629 - DNA, 36 bp, synthetic construct
  misc_feature 1..36: note = Description of Artificial Sequence: Synthetic oligonucleotide
  source 1..36: mol_type = other DNA
accttcytcrgtrgargthggagarccwgchgggct

SEQ ID NO: 1630 - DNA, 36 bp, synthetic construct
  misc_feature 1..36: note = Description of Artificial Sequence: Synthetic oligonucleotide
  source 1..36: mol_type = other DNA
aggtagcgaacckgcwacytcyggytctgaracycc

SEQ ID NO: 1631 - DNA, 36 bp, synthetic construct
  misc_feature 1..36: note = Description of Artificial Sequence: Synthetic oligonucleotide
  source 1..36: mol_type = other DNA
acctggrgtytcagarccrgargtwgcmggttcgct

SEQ ID NO: 1632 - DNA, 36 bp, synthetic construct
  misc_feature 1..36: note = Description of Artificial Sequence: Synthetic oligonucleotide
  source 1..36: mol_type = other DNA
aggtacytctgaaagcgcwacycckgartcyggycc

SEQ ID NO: 1633 - DNA, 36 bp, synthetic construct
  misc_feature 1..36: note = Description of Artificial Sequence: Synthetic oligonucleotide
  source 1..36: mol_type = other DNA
acctggrccrgaytcmggrgtwgcgctttcagargt

SEQ ID NO: 1634 - DNA, 36 bp, synthetic construct
  misc_feature 1..36: note = Description of Artificial Sequence: Synthetic oligonucleotide
  source 1..36: mol_type = other DNA
aggtacytctacygaaccktcygarggyagcgcwcc

SEQ ID NO: 1635 - DNA, 36 bp, synthetic construct
  misc_feature 1..36: note = Description of Artificial Sequence: Synthetic oligonucleotide
  source 1..36: mol_type = other DNA
acctggwgcgctrccytcrgamggttcrgtagargt

SEQ ID NO: 1636 - DNA, 36 bp, synthetic construct
  misc_feature 1..36: note = Description of Artificial Sequence: Synthetic oligonucleotide
  source 1..36: mol_type = other DNA
aggttctacyagcgaatcyccktctggyacygcwcc

SEQ ID NO: 1637 - DNA, 36 bp, synthetic construct
  misc_feature 1..36: note = Description of Artificial Sequence: Synthetic oligonucleotide
  source 1..36: mol_type = other DNA
acctggwgcrgtrccagamggrgattcgctrgtaga

SEQ ID NO: 1638 - DNA, 36 bp, synthetic construct
  misc_feature 1..36: note = Description of Artificial Sequence: Synthetic oligonucleotide
  source 1..36: mol_type = other DNA
aggtacytctacycckgaaagcggytcygcwtctcc

SEQ ID NO: 1639 - DNA, 36 bp, synthetic construct
  misc_feature 1..36: note = Description of Artificial Sequence: Synthetic oligonucleotide
  source 1..36: mol_type = other DNA
acctggagawgcrgarccgctttcmggrgtagargt

SEQ ID NO: 1640 - DNA, 36 bp, synthetic construct
  misc_feature 1..36: note = Description of Artificial Sequence: Synthetic oligonucleotide
  source 1..36: mol_type = other DNA
aggtacytcycckagcggygaatcttctacygcwcc

SEQ ID NO: 1641 - DNA, 36 bp, synthetic construct
  misc_feature 1..36: note = Description of Artificial Sequence: Synthetic oligonucleotide
  source 1..36: mol_type = other DNA
acctggwgcrgtagaagattcrccgctmggrgargt

SEQ ID NO: 1642 - DNA, 36 bp, synthetic construct
  misc_feature 1..36: note = Description of Artificial Sequence: Synthetic oligonucleotide
  source 1..36: mol_type = other DNA
aggttcyacyagctctacygcwgaatctcckggycc

SEQ ID NO: 1643 - DNA, 36 bp, synthetic construct
  misc_feature 1..36: note = Description of Artificial Sequence: Synthetic oligonucleotide
  source 1..36: mol_type = other DNA
acctggrccmggagattcwgcrgtagagctrgtrga

SEQ ID NO: 1644 - DNA, 36 bp, synthetic construct
  misc_feature 1..36: note = Description of Artificial Sequence: Synthetic oligonucleotide
  source 1..36: mol_type = other DNA
aggtacycckggyagcggtacygcwtcttcytctcc

SEQ ID NO: 1645 - DNA, 36 bp, synthetic construct
  misc_feature 1..36: note = Description of Artificial Sequence: Synthetic oligonucleotide
  source 1..36: mol_type = other DNA
acctggagargaagawgcrgtaccgctrccmggrgt

SEQ ID NO: 1646 - DNA, 36 bp, synthetic construct
  misc_feature 1..36: note = Description of Artificial Sequence: Synthetic oligonucleotide
  source 1..36: mol_type = other DNA
aggtagctctacyccktctggtgcwacyggytcycc

SEQ ID NO: 1647 - DNA, 36 bp, synthetic construct
  misc_feature 1..36: note = Description of Artificial Sequence: Synthetic oligonucleotide
  source 1..36: mol_type = other DNA
acctggrgarccrgtwgcaccagamggrgtagagct

SEQ ID NO: 1648 - DNA, 36 bp, synthetic construct
  misc_feature 1..36: note = Description of Artificial Sequence: Synthetic oligonucleotide
  source 1..36: mol_type = other DNA
aggttctagcccktctgcwtcyacyggtacyggycc

SEQ ID NO: 1649 - DNA, 36 bp, synthetic construct
  misc_feature 1..36: note = Description of Artificial Sequence: Synthetic oligonucleotide
  source 1..36: mol_type = other DNA
acctggrccrgtaccrgtrgawgcagamgggctaga

SEQ ID NO: 1650 - DNA, 36 bp, synthetic construct
  misc_feature 1..36: note = Description of Artificial Sequence: Synthetic oligonucleotide
  source 1..36: mol_type = other DNA
aggtgcwtcycckggyacyagctctacyggttctcc

SEQ ID NO: 1651 - DNA, 36 bp, synthetic construct
  misc_feature 1..36: note = Description of Artificial Sequence: Synthetic oligonucleotide
  source 1..36: mol_type = other DNA
acctggagaaccrgtagagctrgtrccmggrgawgc

SEQ ID NO: 1652 - DNA, 57 bp, synthetic construct
  misc_feature 1..57: note = Description of Artificial Sequence: Synthetic oligonucleotide
  source 1..57: mol_type = other DNA
aggtgcaagcgcaagcggcgcgccaagcacgggaggttcgtcttcactcgagggtac

SEQ ID NO: 1653 - DNA, 49 bp, synthetic construct
  misc_feature 1..49: note = Description of Artificial Sequence: Synthetic oligonucleotide
  source 1..49: mol_type = other DNA
cctcgagtgaagacgaacctcccgtgcttggcgcgccgcttgcgcttgc

SEQ ID NO: 1654 - protein, 11 aa, synthetic construct
  REGION 1..11: note = Description of Artificial Sequence: Synthetic peptide
GASASGAPSTG

SEQ ID NO: 1655 - DNA, 57 bp, synthetic construct
  misc_feature 1..57: note = Description of Artificial Sequence: Synthetic oligonucleotide
  source 1..57: mol_type = other DNA
aggtccagaaccaacggggccggccccaagcggaggttcgtcttcactcgagggtac

SEQ ID NO: 1656 - DNA, 49 bp, synthetic construct
  misc_feature 1..49: note = Description of Artificial Sequence: Synthetic oligonucleotide
  source 1..49: mol_type = other DNA
cctcgagtgaagacgaacctccgcttggggccggccccgttggttctgg

SEQ ID NO: 1657 - protein, 11 aa, synthetic construct
  REGION 1..11: note = Description of Artificial Sequence: Synthetic peptide
GPEPTGPAPSG

SEQ ID NO: 1658 - DNA, 43 bp, synthetic construct
  misc_feature 1..43: note = Description of Artificial Sequence: Synthetic primer
  source 1..43: mol_type = other DNA
tattcccgtacggccgccaccatgcaaatagagctctccacct

SEQ ID NO: 1659 - DNA, 32 bp, synthetic construct
  misc_feature 1..32: note = Description of Artificial Sequence: Synthetic primer
  source 1..32: mol_type = other DNA
ggtgacctcgagcgtagaggtcctgtgcctcg

SEQ ID NO: 1660 - protein, 6 aa, synthetic construct
  REGION 1..6: note = Description of Artificial Sequence: Synthetic peptide
ARGHPF

SEQ ID NO: 1661 - protein, 5 aa, synthetic construct
  REGION 1..5: note = Description of Artificial Sequence: Synthetic peptide
NMHTG

SEQ ID NO: 1662 - protein, 5 aa, synthetic construct
  REGION 1..5: note = Description of Artificial Sequence: Synthetic peptide
SPATG

SEQ ID NO: 1663 - DNA, 21 bp, synthetic construct
  misc_feature 1..21: note = Description of Artificial Sequence: Synthetic primer
  source 1..21: mol_type = other DNA
gtgaactctctagacccaccg

SEQ ID NO: 1664 - DNA, 37 bp, synthetic construct
  misc_feature 1..37: note = Description of Artificial Sequence: Synthetic primer
  source 1..37: mol_type = other DNA
ctcctcgaggtcgactcagtagaggtcctgtgcctcg

SEQ ID NO: 1665 - DNA, 92 bp, synthetic construct
  misc_feature 1..92: note = Description of Artificial Sequence: Synthetic primer
  source 1..92: mol_type = other DNA
cgaaagcgctacgcctgagagtggccctggctctgagccagccacctccggctctgaaacccctgcctcgagcccaccagtcttgaaacgcc

SEQ ID NO: 1666 - DNA, 42 bp, synthetic construct
  misc_feature 1..42: note = Description of Artificial Sequence: Synthetic primer
  source 1..42: mol_type = other DNA
tgatatggtatcatcataatcgatttcctcttgatctgactg

SEQ ID NO: 1667 - DNA, 20 bp, synthetic construct
  misc_feature 1..20: note = Description of Artificial Sequence: Synthetic primer
  source 1..20: mol_type = other DNA
agcttgaggatccagagttc

SEQ ID NO: 1668 - DNA, 95 bp, synthetic construct
  misc_feature 1..95: note = Description of Artificial Sequence: Synthetic primer
  source 1..95: mol_type = other DNA
tctcaggcgtagcgctttcgcttgtcccctcttctgttgaggtgggggagccagcaggagaacctggcgcgccgttttgagagaagcttcttggt

SEQ ID NO: 1669 - DNA, 39 bp, synthetic construct
  misc_feature 1..39: note = Description of Artificial Sequence: Synthetic primer
  source 1..39: mol_type = other DNA
tctcaaaacggcgcgccaggtacctcagagtctgctacc

SEQ ID NO: 1670 - DNA, 30 bp, synthetic construct
  misc_feature 1..30: note = Description of Artificial Sequence: Synthetic primer
  source 1..30: mol_type = other DNA
tggtgggctcgaggctggcgcactgccttc

SEQ ID NO: 1671 - DNA, 39 bp, synthetic construct; identical to SEQ ID NO: 1669
  misc_feature 1..39: note = Description of Artificial Sequence: Synthetic primer
  source 1..39: mol_type = other DNA

SEQ ID NO: 1672 - DNA, 30 bp, synthetic construct; identical to SEQ ID NO: 1670
  misc_feature 1..30: note = Description of Artificial Sequence: Synthetic primer
  source 1..30: mol_type = other DNA

SEQ ID NO: 1673 - DNA, 36 bp, synthetic construct
  misc_feature 1..36: note = Description of Artificial Sequence: Synthetic primer
  source 1..36: mol_type = other DNA
ggggccgaaacggccggtacctcagagtctgctacc

SEQ ID NO: 1674 - DNA, 35 bp, synthetic construct
  misc_feature 1..35: note = Description of Artificial Sequence: Synthetic primer
  source 1..35: mol_type = other DNA
tgttcggccgtttcggcccctggcgcactgccttc

SEQ ID NO: 1675 - DNA, 29 bp, synthetic construct
  misc_feature 1..29: note = Description of Artificial Sequence: Synthetic primer
  source 1..29: mol_type = other DNA
ggggccgaaacggccccgggagcgtcacc

SEQ ID NO: 1676 - DNA, 35 bp, synthetic construct
  misc_feature 1..35: note = Description of Artificial Sequence: Synthetic primer
  source 1..35: mol_type = other DNA
tgttcggccgtttcggcccctgacccggttgcccc

SEQ ID NO: 1677 - DNA, 55 bp, synthetic construct
  misc_feature 1..55: note = Description of Artificial Sequence: Synthetic primer
  source 1..55: mol_type = other DNA
caggacctctacggcgcgccagcctcgagcgaacaaaaactcatctcagaagagg

SEQ ID NO: 1678 - DNA, 55 bp, synthetic construct
  misc_feature 1..55: note = Description of Artificial Sequence: Synthetic primer
  source 1..55: mol_type = other DNA
cctcttctgagatgagtttttgttcgctcgaggctggcgcgccgtagaggtcctg

SEQ ID NO: 1679 - DNA, 70 bp, synthetic construct
  misc_feature 1..70: note = Description of Artificial Sequence: Synthetic oligonucleotide
  source 1..70: mol_type = other DNA
ctagcatgcaaatagagctctccacctgcttctttctgtgccttttgcgattctgctttagtgggtctcc

SEQ ID NO: 1680 - DNA, 70 bp, synthetic construct
  misc_feature 1..70: note = Description of Artificial Sequence: Synthetic oligonucleotide
  source 1..70: mol_type = other DNA
acctggagacccactaaagcagaatcgcaaaaggcacagaaagaagcaggtggagagctctatttgcatg

SEQ ID NO: 1681 - DNA, 20 bp, synthetic construct
  misc_feature 1..20: note = Description of Artificial Sequence: Synthetic primer
  source 1..20: mol_type = other DNA
atgatggcatggaagcctat

SEQ ID NO: 1682 - DNA, 91 bp, synthetic construct
  misc_feature 1..91: note = Description of Artificial Sequence: Synthetic primer
  source 1..91: mol_type = other DNA
atccctcaccttcgccagaaccttcagaaccctcaccttcagaaccttcaccagaaccttcaccatcttccgcttcttcattatttttcat

SEQ ID NO: 1683 - DNA, 93 bp, synthetic construct
  misc_feature 1..93: note = Description of Artificial Sequence: Synthetic primer
  source 1..93: mol_type = other DNA
ttctggcgaaggtgagggatctgaaggcggttctgaaggtgaaggtggctctgagggttccgaatatgatgatgatcttactgattctgaaat

SEQ ID NO: 1684 - DNA, 21 bp, synthetic construct
  misc_feature 1..21: note = Description of Artificial Sequence: Synthetic primer
  source 1..21: mol_type = other DNA
tattctctgtgaggtaccagc

SEQ ID NO: 1685 - DNA, 21 bp, synthetic construct
  misc_feature 1..21: note = Description of Artificial Sequence: Synthetic primer
  source 1..21: mol_type = other DNA
tattctctgtgaggtaccagc

SEQ ID NO: 1686 - DNA, 67 bp, synthetic construct
  misc_feature 1..67: note = Description of Artificial Sequence: Synthetic primer
  source 1..67: mol_type = other DNA
gaagctggtacctcacagagaatatacaacgctttctccccaatccaggtgaaggttctggtgaagg

SEQ ID NO: 1687 - DNA, 47 bp, synthetic construct
  misc_feature 1..47: note = Description of Artificial Sequence: Synthetic primer
  source 1..47: mol_type = other DNA
aactctggatcctcaagctgcactccagcttcggaaccctcagagcc

SEQ ID NO: 1688 - protein, 7 aa, synthetic construct
  REGION 1..7: note = Description of Artificial Sequence: Synthetic peptide
KLTRAET

SEQ ID NO: 1689 - protein, 8 aa, synthetic construct
  REGION 1..8: note = Description of Artificial Sequence: Synthetic peptide
LGPVSGVP

SEQ ID NO: 1690 - protein, 8 aa, synthetic construct
  REGION 1..8: note = Description of Artificial Sequence: Synthetic peptide
GPAGLGGA

SEQ ID NO: 1691 - protein, 8 aa, synthetic construct
  REGION 1..8: note = Description of Artificial Sequence: Synthetic peptide
GPAGLRGA

SEQ ID NO: 1692 - protein, 8 aa, synthetic construct
  REGION 1..8: note = Description of Artificial Sequence: Synthetic peptide
APLGLRLR

SEQ ID NO: 1693 - protein, 8 aa, synthetic construct
  REGION 1..8: note = Description of Artificial Sequence: Synthetic peptide
PALPLVAQ

SEQ ID NO: 1694 - protein, 4 aa, synthetic construct
  REGION 1..4: note = Description of Artificial Sequence: Synthetic peptide
GGSG

SEQ ID NO: 1695 - protein, 9 aa, synthetic construct
  REGION 1..9: note = Description of Artificial Sequence: Synthetic peptide
FDKLPRTSG

SEQ ID NO: 1696 - protein, 7 aa, synthetic construct
  REGION 1..7: note = Description of Artificial Sequence: Synthetic peptide
FKLMVWY

SEQ ID NO: 1697 - protein, 44 aa, synthetic construct
  REGION 1..44: note = Description of Artificial Sequence: Synthetic polypeptide
  VAR_SEQ 1: note = Any amino acid
  VAR_SEQ 44: note = Any amino acid
XGAPGSPAGSPTSTEEGTSESATPESGPGSEPATSGSETPASSX

SEQ ID NO: 1698 - protein, 8 aa, synthetic construct
  REGION 1..8: note = Description of Artificial Sequence: Synthetic peptide
RHQREITR

SEQ ID NO: 1699 - protein, 288 aa, synthetic construct
  REGION 1..288: note = Description of Artificial Sequence: Synthetic polypeptide
GTPGSGTASSSPGSSTPSGATGSPGSSTPSGATGSPGSSTPSGATGSPGSSPSASTGTGPGASPGTSSTGSPGASPGTSSTGSPGTPGSGTASSSPGASPGTSSTGSPGASPGTSSTGSPGASPGTSSTGSPGASPGTSSTGSPGTPGSGTASSSPGSSTPSGATGSPGTPGSGTASSSPGSSTPSGATGSPGTPGSGTASSSPGSSTPSGATGSPGSSTPSGATGSPGSSPSASTGTGPGSSPSASTGTGPGASPGTSSTGSPGTPGSGTASSSPGSSTPSGATGSP

SEQ ID NO: 1700 - protein, 6 aa, synthetic construct
  REGION 1..6: note = Description of Artificial Sequence: Synthetic 6xHis tag
HHHHHH

SEQ ID NO: 1701 - DNA, 24 bp, synthetic construct
  misc_feature 1..24: note = Description of Artificial Sequence: Synthetic oligonucleotide
  source 1..24: mol_type = other DNA
gggtctcccgcgccagggtctccc
